(19) United States
(12) Patent Application Publication
(10) Pub. No.: US 2014/0141471 A1
(43) Pub. Date: May 22, 2014

(54) Methods for Enhancing the Degradation of Cellulosic Material with Chitin Binding Proteins

(71) Applicant: Novozymes, Inc., Davis, CA (US)

(72) Inventors: Feng Xu, Davis, CA (US); William Widner, Davis, CA (US); Ani Tejirian, Davis, CA (US)

(73) Assignee: Novozymes, Inc., Davis, CA (US)

(21) Appl. No.: 14/117,308

(22) PCT Filed: May 18, 2012
(86) PCT No.: PCT/US12/38525

§ 371 Date: Jan. 7, 2014

Related U.S. Application Data
(60) Provisional application No. 61/488,094, filed on May 19, 2011.

(51) Int. Cl. C12P 19/14; C12P 19/02

(52) U.S. Cl. CPC C12P 19/14; C12P 19/02
USPC 435/99; 435/158; 435/209; 435/160; 435/165; 435/159; 435/157; 435/167; 435/166; 435/109; 435/110; 435/106; 435/115; 435/116; 435/168; 435/150; 435/140; 435/142; 435/126; 435/144; 435/138; 435/136; 435/137; 435/146; 435/141; 435/139; 435/145

(57) ABSTRACT

The present invention relates to methods for degrading or converting a cellulosic material and for producing substances from the cellulosic material.

### STATEMENT AS TO RIGHTS TO INVENTIONS MADE UNDER FEDERALLY SPONSORED RESEARCH AND DEVELOPMENT

[0001] This invention was made in part with Government support under Cooperative Agreement DE-FC36-08G018080 awarded by the Department of Energy. The government has certain rights in this invention.

### REFERENCE TO A SEQUENCE LISTING

[0002] This application contains a Sequence Listing in computer readable form, which is incorporated herein by reference.

### BACKGROUND OF THE INVENTION

[0003] 1. Field of the Invention

[0004] The present invention relates to methods for degrading or converting a cellulosic material and for producing substances from the cellulosic material.

[0005] 2. Description of the Related Art

[0006] Cellulose is a polymer of the simple sugar glucose covalently linked by beta-1,4-bonds. Many microorganisms produce enzymes that hydrolyze beta-linked glucans. These enzymes include endoglucanases, cellobiohydrolases, and beta-glucosidases. Endoglucanases digest the cellulose polymer at random locations, opening it to attack by cellobiohydrolases. Cellobiohydrolases sequentially release molecules of cellobiose from the ends of the cellulose polymer. Cellobiose is a water-soluble beta-1,4-linked dimer of glucose. Beta-glucosidases hydrolyze cellobiose to glucose.

[0007] The conversion of lignocellulosic feedstocks into ethanol has the advantages of the ready availability of large amounts of feedstock, the desirability of avoiding burning or land filling the materials, and the cleanliness of the ethanol fuel. Wood, agricultural residues, herbaceous crops, and municipal solid wastes have been considered as feedstocks for ethanol production. These materials primarily consist of cellulose, hemicellulose, and lignin. Once the lignocellulose is converted to fermentable sugars, e.g., glucose, the fermentable sugars are easily fermented by yeast into ethanol.

[0008] WO 2005/074647, WO 2008/148131, and WO 2011/035027 disclose GH61 polypeptides having cellulolytic enhancing activity and the polynucleotides thereof from Thielavia terrestris. WO 2005/074656 and WO 2010/065830 disclose GH61 polypeptides having cellulolytic enhancing activity and the polynucleotides thereof from Thermoascus aurantiacus. WO 2007/089290 discloses a GH61 polypeptide having cellulolytic enhancing activity and the polynucleotide thereof from Trichoderma reesei. WO 2009/085935, WO 2009/085859, WO 2009/085864, and WO 2009/085868 disclose GH61 polypeptides having cellulolytic enhancing activity and the polynucleotides thereof from Myceliophthora thermophila. WO 2010/138754 discloses GH61 polypeptides having cellulolytic enhancing activity and the polynucleotides thereof from Aspergillus fumigatus. WO 2011/005867 discloses GH61 polypeptides having cellulolytic enhancing activity and the polynucleotides thereof from Penicillium pinophilum. WO 2011/039319 discloses GH61 polypeptides having cellulolytic enhancing activity and the polynucleotides thereof from Thermoascus sp. WO 2011/041397 discloses GH61 polypeptides having cellulolytic enhancing activity and the polynucleotides thereof from Penicillium sp. (emersonii) WO 2011/041504 discloses GH61 polypeptides having cellulolytic enhancing activity and the polynucleotides thereof from Thermoascus crustaceous. WO 2008/151043 discloses methods of increasing the activity of a GH61 polypeptide having cellulolytic enhancing activity by adding a soluble activating divalent metal cation to a composition comprising the polypeptide.

[0009] Degradation of chitinous biomass involves individually or a mixture of hydrolytic exo- and endo-acting enzymes (Fukamizo, 2000, Curr. Protein Pept. Sci. 1(1):105-24; Horn et al., 2006, FEBS J. 273: 491-503). The enzymatic hydrolysis of chitin involves hydrolytic cleavage of glycoside bonds that connect the beta-(1-4) N-acetylglucosamine bond units in a chitin substrate. Examples of enzymes involved in the hydrolysis of chitinous biomass include chitinase, chitosanase (GH46, GH75 and GH80), or lysozyme (GH23 and GH24). The efficiency of such enzymatic hydrolysis can reportedly be improved by the presence of a chitin binding protein (CBP) (Vanje-Kolstad et al., 2005, J. Biol. Chem. 280: 11313-11319; Vanje-Kolstad et al., 2005, J. Biol. Chem. 280: 28492-28497; Horn et al., 2006, supra; U.S. Patent Application 20070218046; Vanje-Kolstad et al., 2010, Science 330: 219).

[0010] There is a need in the art for improving the efficiency of cellulolytic enzyme compositions in the saccharification of cellulosic material.

[0011] The present invention provides improved methods for degrading or converting a cellulosic material with an enzyme composition in the presence of a chitin binding protein.

### SUMMARY OF THE INVENTION

[0012] The present invention relates to methods for degrading or converting a cellulosic material, comprising: treating the cellulosic material with an enzyme composition in the presence of a chitin binding protein. In one aspect, the methods further comprise recovering the degraded or converted cellulosic material. In another aspect, the cellulosic material is treated with an enzyme composition in the presence of a chitin binding protein and a GH61 polypeptide having cellulolytic enhancing activity.

[0013] The present invention also relates to methods for producing a fermentation product, comprising: (a) saccharifying a cellulosic material with an enzyme composition in the presence of a chitin binding protein; (b) fermenting the saccharified cellulosic material with one or more (e.g., several) fermenting microorganisms to produce the fermentation product; and (c) recovering the fermentation product from the fermentation. In one aspect, the cellulosic material is saccharified with an enzyme composition in the presence of a chitin binding protein and a GH61 polypeptide having cellulolytic enhancing activity.

[0014] The present invention also relates to methods of fermenting a cellulosic material, comprising: fermenting the cellulosic material with one or more (e.g., several) fermenting microorganisms, wherein the cellulosic material is saccharified with an enzyme composition in the presence of a chitin binding protein. In one aspect, the cellulosic material is saccharified with an enzyme composition in the presence of a chitin binding protein and a GH61 polypeptide having cellulolytic enhancing activity.

[0015] In another aspect, the chitin binding protein is selected from the group consisting of:

[0016] (a) a chitin binding protein having at least 60% sequence identity to the full-length or mature chitin binding protein of SEQ ID NO: 2, SEQ ID NO: 4, SEQ ID NO: 6, SEQ ID NO: 8, SEQ ID NO: 10, SEQ ID NO: 12, SEQ ID NO: 14, SEQ ID NO: 16, SEQ ID NO: 18, SEQ ID NO: 20, SEQ ID NO: 22, SEQ ID NO: 24, SEQ ID NO: 26, SEQ ID NO: 28, SEQ ID NO: 30, SEQ ID NO: 32, SEQ ID NO: 34, SEQ ID NO: 36, SEQ ID NO: 38, SEQ ID NO: 40, SEQ ID NO: 42, SEQ ID NO: 44, SEQ ID NO: 46, SEQ ID NO: 48, SEQ ID NO: 50, SEQ ID NO: 52, SEQ ID NO: 54, SEQ ID NO: 56, SEQ ID NO: 58, SEQ ID NO: 60, SEQ ID NO: 62, SEQ ID NO: 64, SEQ ID NO: 66, SEQ ID NO: 68, SEQ ID NO: 70, SEQ ID NO: 72, SEQ ID NO: 74, SEQ ID NO: 76, SEQ ID NO: 78, SEQ ID NO: 80, SEQ ID NO: 82, SEQ ID NO: 84, SEQ ID NO: 86, SEQ ID NO: 88, SEQ ID NO: 90, SEQ ID NO: 92, SEQ ID NO: 94, SEQ ID NO: 96, SEQ ID NO: 98, SEQ ID NO: 100, SEQ ID NO: 102, SEQ ID NO: 104, SEQ ID NO: 106, SEQ ID NO: 108, SEQ ID NO: 110, SEQ ID NO: 112, SEQ ID NO: 114, SEQ ID NO: 116, SEQ ID NO: 118, SEQ ID NO: 120, SEQ ID NO: 122, SEQ ID NO: 124, SEQ ID NO: 126, SEQ ID NO: 128, SEQ ID NO: 130, SEQ ID NO: 132, SEQ ID NO: 134, SEQ ID NO: 136, SEQ ID NO: 138, SEQ ID NO: 140, SEQ ID NO: 142, SEQ ID NO: 144, SEQ ID NO: 146, SEQ ID NO: 148, SEQ ID NO: 150, SEQ ID NO: 152, SEQ ID NO: 154, SEQ ID NO: 156, SEQ ID NO: 158, SEQ ID NO: 160, SEQ ID NO: 162, SEQ ID NO: 164, SEQ ID NO: 166, SEQ ID NO: 168, SEQ ID NO: 170, SEQ ID NO: 172, SEQ ID NO: 174, SEQ ID NO: 176, SEQ ID NO: 178, or SEQ ID NO: 180; or the CBM33 thereof;

[0017] (b) a chitin binding protein encoded by a polynucleotide that hybridizes under at least medium-high stringency conditions with the full-length or mature chitin binding protein coding sequence of SEQ ID NO: 1, SEQ ID NO: 3, SEQ ID NO: 5, SEQ ID NO: 7, SEQ ID NO: 9, SEQ ID NO: 11, SEQ ID NO: 13, SEQ ID NO: 15, SEQ ID NO: 17, SEQ ID NO: 19, SEQ ID NO: 21, SEQ ID NO: 23, SEQ ID NO: 25, SEQ ID NO: 27, SEQ ID NO: 29, SEQ ID NO: 31, SEQ ID NO: 33, SEQ ID NO: 35, SEQ ID NO: 37, SEQ ID NO: 39, SEQ ID NO: 41, SEQ ID NO: 43, SEQ ID NO: 45, SEQ ID NO: 47, SEQ ID NO: 49, SEQ ID NO: 51, SEQ ID NO: 53, SEQ ID NO: 55, SEQ ID NO: 57, SEQ ID NO: 59, SEQ ID NO: 61, SEQ ID NO: 63, SEQ ID NO: 65, SEQ ID NO: 67, SEQ ID NO: 69, SEQ ID NO: 71, SEQ ID NO: 73, SEQ ID NO: 75, SEQ ID NO: 77, SEQ ID NO: 79, SEQ ID NO: 81, SEQ ID NO: 83, SEQ ID NO: 85, SEQ ID NO: 87, SEQ ID NO: 89, SEQ ID NO: 91, SEQ ID NO: 93, SEQ ID NO: 95, SEQ ID NO: 97, SEQ ID NO: 99, SEQ ID NO: 101, SEQ ID NO: 103, SEQ ID NO: 105, SEQ ID NO: 107, SEQ ID NO: 109, SEQ ID NO: 111, SEQ ID NO: 113, SEQ ID NO: 115, SEQ ID NO: 117, SEQ ID NO: 119, SEQ ID NO: 121, SEQ ID NO: 123, SEQ ID NO: 125, SEQ ID NO: 127, SEQ ID NO: 129, SEQ ID NO: 131, SEQ ID NO: 133, SEQ ID NO: 135, SEQ ID NO: 137, SEQ ID NO: 139, SEQ ID NO: 141, SEQ ID NO: 143, SEQ ID NO: 145, SEQ ID NO: 147, SEQ ID NO: 149, SEQ ID NO: 151, SEQ ID NO: 153, SEQ ID NO: 155, SEQ ID NO: 157, SEQ ID NO: 159, SEQ ID NO: 161, SEQ ID NO: 163, SEQ ID NO: 165, SEQ ID NO: 167, SEQ ID NO: 169, SEQ ID NO: 171, SEQ ID NO: 173, SEQ ID NO: 175, SEQ ID NO: 177, or SEQ ID NO: 179; or the CBM33 coding sequence thereof; or the full-length complement thereof;

[0018] (c) a chitin binding protein encoded by a polynucleotide having at least 60% sequence identity to the full-length or mature chitin binding protein coding sequence of SEQ ID NO: 1, SEQ ID NO: 3, SEQ ID NO: 5, SEQ ID NO: 7, SEQ ID NO: 9, SEQ ID NO: 11, SEQ ID NO: 13, SEQ ID NO: 15, SEQ ID NO: 17, SEQ ID NO: 19, SEQ ID NO: 21, SEQ ID NO: 23, SEQ ID NO: 25, SEQ ID NO: 27, SEQ ID NO: 29, SEQ ID NO: 31, SEQ ID NO: 33, SEQ ID NO: 35, SEQ ID NO: 37, SEQ ID NO: 39, SEQ ID NO: 41, SEQ ID NO: 43, SEQ ID NO: 45, SEQ ID NO: 47, SEQ ID NO: 49, SEQ ID NO: 51, SEQ ID NO: 53, SEQ ID NO: 55, SEQ ID NO: 57, SEQ ID NO: 59, SEQ ID NO: 61, SEQ ID NO: 63, SEQ ID NO: 65, SEQ ID NO: 67, SEQ ID NO: 69, SEQ ID NO: 71, SEQ ID NO: 73, SEQ ID NO: 75, SEQ ID NO: 77, SEQ ID NO: 79, SEQ ID NO: 81, SEQ ID NO: 83, SEQ ID NO: 85, SEQ ID NO: 87, SEQ ID NO: 89, SEQ ID NO: 91, SEQ ID NO: 93, SEQ ID NO: 95, SEQ ID NO: 97, SEQ ID NO: 99, SEQ ID NO: 101, SEQ ID NO: 103, SEQ ID NO: 105, SEQ ID NO: 107, SEQ ID NO: 109, SEQ ID NO: 111, SEQ ID NO: 113, SEQ ID NO: 115, SEQ ID NO: 117, SEQ ID NO: 119, SEQ ID NO: 121, SEQ ID NO: 123, SEQ ID NO: 125, SEQ ID NO: 127, SEQ ID NO: 129, SEQ ID NO: 131, SEQ ID NO: 133, SEQ ID NO: 135, SEQ ID NO: 137, SEQ ID NO: 139, SEQ ID NO: 141, SEQ ID NO: 143, SEQ ID NO: 145, SEQ ID NO: 147, SEQ ID NO: 149, SEQ ID NO: 151, SEQ ID NO: 153, SEQ ID NO: 155, SEQ ID NO: 157, SEQ ID NO: 159, SEQ ID NO: 161, SEQ ID NO: 163, SEQ ID NO: 165, SEQ ID NO: 167, SEQ ID NO: 169, SEQ ID NO: 171, SEQ ID NO: 173, SEQ ID NO: 175, SEQ ID NO: 177, or SEQ ID NO: 179; or the CBM33 coding sequence thereof;

[0019] (d) a variant of the mature chitin binding protein of SEQ ID NO: 2, SEQ ID NO: 4, SEQ ID NO: 6, SEQ ID NO: 8, SEQ ID NO: 10, SEQ ID NO: 12, SEQ ID NO: 14, SEQ ID NO: 16, SEQ ID NO: 18, SEQ ID NO: 20, SEQ ID NO: 22, SEQ ID NO: 24, SEQ ID NO: 26, SEQ ID NO: 28, SEQ ID NO: 30, SEQ ID NO: 32, SEQ ID NO: 34, SEQ ID NO: 36, SEQ ID NO: 38, SEQ ID NO: 40, SEQ ID NO: 42, SEQ ID NO: 44, SEQ ID NO: 46, SEQ ID NO: 48, SEQ ID NO: 50, SEQ ID NO: 52, SEQ ID NO: 54, SEQ ID NO: 56, SEQ ID NO: 58, SEQ ID NO: 60, SEQ ID NO: 62, SEQ ID NO: 64, SEQ ID NO: 66, SEQ ID NO: 68, SEQ ID NO: 70, SEQ ID NO: 72, SEQ ID NO: 74, SEQ ID NO: 76, SEQ ID NO: 78, SEQ ID NO: 80, SEQ ID NO: 82, SEQ ID NO: 84, SEQ ID NO: 86, SEQ ID NO: 88, SEQ ID NO: 90, SEQ ID NO: 92, SEQ ID NO: 94, SEQ ID NO: 96, SEQ ID NO: 98, SEQ ID NO: 100, SEQ ID NO: 102, SEQ ID NO: 104, SEQ ID NO: 106, SEQ ID NO: 108, SEQ ID NO: 110, SEQ ID NO: 112, SEQ ID NO: 114, SEQ ID NO: 116, SEQ ID NO: 118, SEQ ID NO: 120, SEQ ID NO: 122, SEQ ID NO: 124, SEQ ID NO: 126, SEQ ID NO: 128, SEQ ID NO: 130, SEQ ID NO: 132, SEQ ID NO: 134, SEQ ID NO: 136, SEQ ID NO: 138, SEQ ID NO: 140, SEQ ID NO: 142, SEQ ID NO: 144, SEQ ID NO: 146, SEQ ID NO: 148, SEQ ID NO: 150, SEQ ID NO: 152, SEQ ID NO: 154, SEQ ID NO: 156, SEQ ID NO: 158, SEQ ID NO: 160, SEQ ID NO: 162, SEQ ID NO: 164, SEQ ID NO: 166, SEQ ID NO: 168, SEQ ID NO: 170, SEQ ID NO: 172, SEQ ID NO: 174, SEQ ID NO: 176, SEQ ID NO: 178, or SEQ ID NO: 180, or the CBM33 thereof, comprising a substitution, deletion, and/or insertion at one or more (e.g., several) positions; and

[0020] (e) a fragment of the chitin binding protein of (a), (b), (c), or (d) that has chitin binding activity.

[0021] The present invention also relates to whole broth formulations, cell culture compositions, or enzyme compositions comprising a chitin binding protein or a chitin binding protein and a GH61 polypeptide having cellulolytic enhancing activity.

### BRIEF DESCRIPTION OF THE FIGURES

[0022] FIG. 1 shows a restriction map of pBW78.

[0023] FIG. 2 shows the effect of a Bacillus licheniformis chitin binding protein (CBP) on hydrolysis of dilute acid-pretreated corn stover by a blend of an Aspergillus aculeatus GH10 xylanase (WO 94/021785) and a Trichoderma reesei cellulase preparation containing Aspergillus fumigatus beta-glucosidase (WO 2005/047499) and Thermoascus aurantiacus GH61A polypeptide (WO 2005/074656).

[0024] FIG. 3 shows the effect of a Bacillus licheniformis chitin binding protein (CBP) on degrading phosphoric acid-swollen cellulose (PASO) in the absence and presence of Thermoascus aurantiacus GH61A polypeptide.

### DEFINITIONS

[0025] Acetylxylan esterase: The term “acetylxylan esterase” means a carboxylesterase (EC 3.1.1.72) that catalyzes the hydrolysis of acetyl groups from polymeric xylan, acetylated xylose, acetylated glucose, alpha-napthyl acetate, and p-nitrophenyl acetate. For purposes of the present invention, acetylxylan esterase activity is determined using 0.5 mM p-nitrophenylacetate as substrate in 50 mM sodium acetate pH 5.0 containing 0.01% TWEEN™ 20 (polyoxyethylene sorbitan monolaurate). One unit of acetylxylan esterase is defined as the amount of enzyme capable of releasing 1 pmole of p-nitrophenolate anion per minute at pH 5, 25° C.

[0026] Allelic variant: The term “allelic variant” means any of two or more alternative forms of a gene occupying the same chromosomal locus. Allelic variation arises naturally through mutation, and may result in polymorphism within populations. Gene mutations can be silent (no change in the encoded polypeptide) or may encode polypeptides having altered amino acid sequences. An allelic variant of a polypeptide is a polypeptide encoded by an allelic variant of a gene.

[0027] Alpha-L-arabinofuranosidase: The term “alpha-L-arabinofuranosidase” means an alpha-L-arabinofuranoside arabinofuranohydrolase (EC 3.2.1.55) that catalyzes the hydrolysis of terminal non-reducing alpha-L-arabinofuranoside residues in alpha-L-arabinosides. The enzyme acts on alpha-L-arabinofuranosides, alpha-L-arabinans containing (1,3)- and/or (1,5)-linkages, arabinoxylans, and arabinogalactans. Alpha-L-arabinofuranosidase is also known as arabinosidase, alpha-arabinosidase, alpha-L-arabinosidase, alpha-arabinofuranosidase, polysaccharide alpha-L-arabinofuranosidase, alpha-L-arabinofuranoside hydrolase, L-arabinosidase, or alpha-L-arabinanase. For purposes of the present invention, alpha-L-arabinofuranosidase activity is determined using 5 mg of medium viscosity wheat arabinoxylan (Megazyme International Ireland, Ltd., Bray, Co. Wicklow, Ireland) per ml of 100 mM sodium acetate pH 5 in a total volume of 200 μl for 30 minutes at 40° C. followed by arabinose analysis by AMINEX® HPX-87H column chromatography (Bio-Rad Laboratories, Inc., Hercules, Calif., USA).

[0028] Alpha-glucuronidase: The term “alpha-glucuronidase” means an alpha-D-glucosiduronate glucuronohydrolase (EC 3.2.1.139) that catalyzes the hydrolysis of an alpha-D-glucuronoside to D-glucuronate and an alcohol. For purposes of the present invention, alpha-glucuronidase activity is determined according to de Vries, 1998, J. Bacteriol. 180: 243-249. One unit of alpha-glucuronidase equals the amount of enzyme capable of releasing 1 pmole of glucuronic or 4-O-methylglucuronic acid per minute at pH 5, 40° C.

[0029] Beta-glucosidase: The term “beta-glucosidase” means a beta-D-glucoside glucohydrolase (E.C. 3.2.1.21) that catalyzes the hydrolysis of terminal non-reducing beta-D-glucose residues with the release of beta-D-glucose. For purposes of the present invention, beta-glucosidase activity is determined using p-nitrophenyl-beta-D-glucopyranoside as substrate according to the procedure of Venturi et al., 2002, Extracellular beta-D-glucosidase from Chaetomium thermophilum var. coprophilum: production, purification and some biochemical properties, J. Basic Microbiol. 42: 55-66. One unit of beta-glucosidase is defined as 1.0 pmole of p-nitrophenolate anion produced per minute at 25° C., pH 4.8 from 1 mM p-nitrophenyl-beta-D-glucopyranoside as substrate in 50 mM sodium citrate containing 0.01% TWEEN® 20.

[0030] Beta-xylosidase: The term “beta-xylosidase” means a beta-D-xyloside xylohydrolase (E.C. 3.2.1.37) that catalyzes the exo-hydrolysis of short beta-(4)-xylooligosaccharides, to remove successive D-xylose residues from non-reducing termini. For purposes of the present invention, one unit of beta-xylosidase is defined as 1.0 pmole of p-nitrophenolate anion produced per minute at 40° C., pH 5 from 1 mM p-nitrophenyl-beta-D-xyloside as substrate in 100 mM sodium citrate containing 0.01% TWEEN® 20.

[0031] Carbohydrate binding module or CBM: The term “carbohydrate binding module” or “CBM” means a contiguous amino acid sequence within a carbohydrate binding protein with a discreet fold having carbohydrate-binding activity. The term carbohydrate binding module is also referred herein as a chitin binding module.

[0032] CBM33: The term “CBM33” means a carbohydrate binding module of Family 33, according to the CAZY classification system (Davies and Henrissat, 2002, Biochem. Soc. T30: 291-297 and Bourne and Henrissat, 2001, Curr. Opin. Struct. Biol. 11: 593).

[0033] cDNA: The term “cDNA” means a DNA molecule that can be prepared by reverse transcription from a mature, spliced, mRNA molecule obtained from a eukaryotic or prokaryotic cell. cDNA lacks intron sequences that may be present in the corresponding genomic DNA. The initial, primary RNA transcript is a precursor to mRNA that is processed through a series of steps, including splicing, before appearing as mature spliced mRNA.

[0034] Cellobiohydrolase: The term “cellobiohydrolase” means a 1,4-beta-D-glucan cellobiohydrolase (E.C. 3.2.1.91 and E.C. 3.2.1.176) that catalyzes the hydrolysis of 1,4-beta-D-glucosidic linkages in cellulose, cellooligosaccharides, or any beta-1,4-linked glucose containing polymer, releasing cellobiose from the reducing or non-reducing ends of the chain (Teeri, 1997, Crystalline cellulose degradation: New insight into the function of cellobiohydrolases, Trends in Biotechnology 15: 160-167; Teeri et al., 1998, Trichoderma reesei cellobiohydrolases: why so efficient on crystalline cellulose?, Biochem. Soc. Trans. 26: 173-178). Cellobiohydrolase activity is determined according to the procedures described by Lever et al., 1972, Anal. Biochem. 47: 273-279; van Tilbeurgh et al., 1982, FEBS Letters, 149: 152-156; van Tilbeurgh and Claeyssens, 1985, FEBS Letters, 187: 283-288; and Tomme et al., 1988, Eur. J. Biochem. 170: 575-581. In the present invention, the Tomme et al. method can be used to determine cellobiohydrolase activity.

[0035] Cellulolytic enzyme or cellulase: The term “cellulolytic enzyme” or “cellulase” means one or more (e.g., several) enzymes that hydrolyze a cellulosic material. Such enzymes include endoglucanase(s), cellobiohydrolase(s), beta-glucosidase(s), or combinations thereof. The two basic approaches for measuring cellulolytic activity include: (1) measuring the total cellulolytic activity, and (2) measuring the individual cellulolytic activities (endoglucanases, cellobiohydrolases, and beta-glucosidases) as reviewed in Zhang et al., Outlook for cellulase improvement: Screening and selection strategies, 2006, Biotechnology Advances 24: 452-481. Total cellulolytic activity is usually measured using insoluble substrates, including Whatman No 1 filter paper, microcrystalline cellulose, bacterial cellulose, algal cellulose, cotton, pretreated lignocellulose, etc. The most common total cellulolytic activity assay is the filter paper assay using Whatman NQ1 filter paper as the substrate. The assay was established by the International Union of Pure and Applied Chemistry (IUPAC) (Ghose, 1987, Measurement of cellulase activities, Pure Appl. Chem. 59: 257-68).

[0036] For purposes of the present invention, cellulolytic enzyme activity is determined by measuring the increase in hydrolysis of a cellulosic material by cellulolytic enzyme(s) under the following conditions: 1-50 mg of cellulolytic enzyme protein/g of cellulose in PCS (or other pretreated cellulosic material) for 3-7 days at a suitable temperature, e.g., 50° C., 55° C., 60° C., or 65° C., compared to a control hydrolysis without addition of cellulolytic enzyme protein. Typical conditions are 1 ml reactions, washed or unwashed PCS, 5% insoluble solids, 50 mM sodium acetate pH 5, 1 mM MnSO₄, 50° C., 55° C., 60° C., or 65° C., 72 hours, sugar analysis by AMINEX® HPX-87H column (Bio-Rad Laboratories, Inc., Hercules, Calif., USA).

[0037] Cellulosic material: The term “cellulosic material” means any material containing cellulose. The predominant polysaccharide in the primary cell wall of biomass is cellulose, the second most abundant is hemicellulose, and the third is pectin. The secondary cell wall, produced after the cell has stopped growing, also contains polysaccharides and is strengthened by polymeric lignin covalently cross-linked to hemicellulose. Cellulose is a homopolymer of anhydrocellobiose and thus a linear beta-(1-4)-D-glucan, while hemicelluloses include a variety of compounds, such as xylans, xyloglucans, arabinoxylans, and mannans in complex branched structures with a spectrum of substituents. Although generally polymorphous, cellulose is found in plant tissue primarily as an insoluble crystalline matrix of parallel glucan chains. Hemicelluloses usually hydrogen bond to cellulose, as well as to other hemicelluloses, which help stabilize the cell wall matrix.

[0038] Cellulose is generally found, for example, in the stems, leaves, hulls, husks, and cobs of plants or leaves, branches, and wood of trees. The cellulosic material can be, but is not limited to, agricultural residue, herbaceous material (including energy crops), municipal solid waste, pulp and paper mill residue, waste paper, and wood (including forestry residue) (see, for example, Wiselogel et al., 1995, in Handbook on Bioethanol (Charles E. Wyman, editor), pp. 105-118, Taylor & Francis, Washington D.C.; Wyman, 1994, Bioresource Technology 50: 3-16; Lynd, 1990, Applied Biochemistry and Biotechnology 24/25: 695-719; Mosier et al., 1999, Recent Progress in Bioconversion of Lignocellulosics, in Advances in Biochemical Engineering/Biotechnology, T. Scheper, managing editor, Volume 65, pp. 23-40, Springer-Verlag, New York). It is understood herein that the cellulose may be in the form of lignocellulose, a plant cell wall material containing lignin, cellulose, and hemicellulose in a mixed matrix. In a preferred aspect, the cellulosic material is any biomass material. In another preferred aspect, the cellulosic material is lignocellulose, which comprises cellulose, hemicelluloses, and lignin.

[0039] In one aspect, the cellulosic material is agricultural residue. In another aspect, the cellulosic material is herbaceous material (including energy crops). In another aspect, the cellulosic material is municipal solid waste. In another aspect, the cellulosic material is pulp and paper mill residue. In another aspect, the cellulosic material is waste paper. In another aspect, the cellulosic material is wood (including forestry residue).

[0040] In another aspect, the cellulosic material is arundo. In another aspect, the cellulosic material is bagasse. In another aspect, the cellulosic material is bamboo. In another aspect, the cellulosic material is corn cob. In another aspect, the cellulosic material is corn fiber. In another aspect, the cellulosic material is corn stover. In another aspect, the cellulosic material is miscanthus. In another aspect, the cellulosic material is orange peel. In another aspect, the cellulosic material is rice straw. In another aspect, the cellulosic material is switchgrass. In another aspect, the cellulosic material is wheat straw.

[0041] In another aspect, the cellulosic material is aspen. In another aspect, the cellulosic material is eucalyptus. In another aspect, the cellulosic material is fir. In another aspect, the cellulosic material is pine. In another aspect, the cellulosic material is poplar. In another aspect, the cellulosic material is spruce. In another aspect, the cellulosic material is willow.

[0042] In another aspect, the cellulosic material is algal cellulose. In another aspect, the cellulosic material is bacterial cellulose. In another aspect, the cellulosic material is cotton linter. In another aspect, the cellulosic material is filter paper. In another aspect, the cellulosic material is microcrystalline cellulose. In another aspect, the cellulosic material is phosphoric-acid treated cellulose.

[0043] In another aspect, the cellulosic material is an aquatic biomass. As used herein the term “aquatic biomass” means biomass produced in an aquatic environment by a photosynthesis process. The aquatic biomass can be algae, emergent plants, floating-leaf plants, or submerged plants.

[0044] The cellulosic material may be used as is or may be subjected to pretreatment, using conventional methods known in the art, as described herein. In a preferred aspect, the cellulosic material is pretreated.

[0045] Chitin: The term “chitin” means any polymer containing beta-(1-4)-N-acetylglucosamine residues linked in a linear fashion. The term chitin includes without limitation crystalline chitin in the alpha form (chains run anti-parallel), beta form (chains run parallel), gamma form (a mixture of parallel and antiparallel chains), amorphous chitin, colloidal chitin, chitin forms in which part of the N-acetylglucosamine sugars are deacetylated, and chitosan.

[0046] Chitin binding protein or CBP: The term “chitin binding protein” or “CBP” means a protein with binding affinity primarily to chitin (but also various carbohydrates containing N-acetyl-glucosamine or N-acetyl-neuraminic acid subunits). In a preferred aspect, a chitin binding protein comprises or consists of a CBM33. A chitin binding protein may primarily comprise a CBM33 or a CBM33 fused to other carbohydrate binding modules, e.g., CBM2, CBM3, and CBM5, and/or other catalytic proteins. The ability of a chitin binding protein to enhance the hydrolysis of a chitin substrate by, for example, a chitinase, can be determined according to the method described in U.S. Patent Application 20070218046. The ability of a chitin binding protein to enhance the degradation of a cellulosic material by a cellulase composition can be determined according to the Examples described herein. The ability of a chitin binding protein to synergize with a GH61 polypeptide in the degradation of a cellulosic material can be determined according to the Examples described herein.

[0047] The chitin binding proteins enhance the hydrolysis of a cellulosic material catalyzed by enzyme having cellulolytic activity by at least 1.01-fold, e.g., at least 1.025-fold, at least 1.05-fold, at least 1.075-fold, at least 1.10-fold, at least 1.25-fold, at least 1.5-fold, at least 2-fold, at least 3-fold, at least 4-fold, at least 5-fold, at least 10-fold, or at least 20-fold.

[0048] The combination of a chitin binding protein and a GH61 polypeptide having cellulolytic enhancing activity yield a CBP-GH61 synergistic effect (see Example 9) toward a cellulosic material of at least 1.01, e.g., at least 1.025, at least 1.05, at least 1.075, at least 1.10, at least 1.25, at least 1.5, at least 1.75, at least 2, at least 3, at least 4, at least 5, at least 10, or at least 20.

[0049] In one aspect, the chitin binding proteins have at least 20%, e.g., at least 40%, at least 50%, at least 60%, at least 70%, at least 80%, at least 90%, at least 95%, and at least 100% of the chitin binding activity of the mature chitin binding protein of SEQ ID NO: 2, SEQ ID NO: 4, SEQ ID NO: 6, SEQ ID NO: 8, SEQ ID NO: 10, SEQ ID NO: 12, SEQ ID NO: 14, SEQ ID NO: 16, SEQ ID NO: 18, SEQ ID NO: 20, SEQ ID NO: 22, SEQ ID NO: 24, SEQ ID NO: 26, SEQ ID NO: 28, SEQ ID NO: 30, SEQ ID NO: 32, SEQ ID NO: 34, SEQ ID NO: 36, SEQ ID NO: 38, SEQ ID NO: 40, SEQ ID NO: 42, SEQ ID NO: 44, SEQ ID NO: 46, SEQ ID NO: 48, SEQ ID NO: 50, SEQ ID NO: 52, SEQ ID NO: 54, SEQ ID NO: 56, SEQ ID NO: 58, SEQ ID NO: 60, SEQ ID NO: 62, SEQ ID NO: 64, SEQ ID NO: 66, SEQ ID NO: 68, SEQ ID NO: 70, SEQ ID NO: 72, SEQ ID NO: 74, SEQ ID NO: 76, SEQ ID NO: 78, SEQ ID NO: 80, SEQ ID NO: 82, SEQ ID NO: 84, SEQ ID NO: 86, SEQ ID NO: 88, SEQ ID NO: 90, SEQ ID NO: 92, SEQ ID NO: 94, SEQ ID NO: 96, SEQ ID NO: 98, SEQ ID NO: 100, SEQ ID NO: 102, SEQ ID NO: 104, SEQ ID NO: 106, SEQ ID NO: 108, SEQ ID NO: 110, SEQ ID NO: 112, SEQ ID NO: 114, SEQ ID NO: 116, SEQ ID NO: 118, SEQ ID NO: 120, SEQ ID NO: 122, SEQ ID NO: 124, SEQ ID NO: 126, SEQ ID NO: 128, SEQ ID NO: 130, SEQ ID NO: 132, SEQ ID NO: 134, SEQ ID NO: 136, SEQ ID NO: 138, SEQ ID NO: 140, SEQ ID NO: 142, SEQ ID NO: 144, SEQ ID NO: 146, SEQ ID NO: 148, SEQ ID NO: 150, SEQ ID NO: 152, SEQ ID NO: 154, SEQ ID NO: 156, SEQ ID NO: 158, SEQ ID NO: 160, SEQ ID NO: 162, SEQ ID NO: 164, SEQ ID NO: 166, SEQ ID NO: 168, SEQ ID NO: 170, SEQ ID NO: 172, SEQ ID NO: 174, SEQ ID NO: 176, SEQ ID NO: 178, or SEQ ID NO: 180; or the CBM33 thereof.

[0050] Coding sequence: The term “coding sequence” means a polynucleotide, which directly specifies the amino acid sequence of a polypeptide. The boundaries of the coding sequence are generally determined by an open reading frame, which begins with a start codon such as ATG, GTG, or TTG and ends with a stop codon such as TAA, TAG, or TGA. The coding sequence may be a genomic DNA, cDNA, synthetic DNA, or a combination thereof.

[0051] Control sequences: The term “control sequences” means nucleic acid sequences necessary for expression of a polynucleotide encoding a mature polypeptide. Each control sequence may be native (i.e., from the same gene) or foreign (i.e., from a different gene) to the polynucleotide encoding the polypeptide or native or foreign to each other. Such control sequences include, but are not limited to, a leader, polyadenylation sequence, propeptide sequence, promoter, signal peptide sequence, and transcription terminator. At a minimum, the control sequences include a promoter, and transcriptional and translational stop signals. The control sequences may be provided with linkers for the purpose of introducing specific restriction sites facilitating ligation of the control sequences with the coding region of the polynucleotide encoding a polypeptide.

[0052] Endoglucanase: The term “endoglucanase” means an endo-1,4-(1,3;1,4)-beta-D-glucan 4-glucanohydrolase (E.C. 3.2.1.4) that catalyzes endohydrolysis of 1,4-beta-D-glycosidic linkages in cellulose, cellulose derivatives (such as carboxymethyl cellulose and hydroxyethyl cellulose), lichenin, beta-1,4 bonds in mixed beta-1,3 glucans such as cereal beta-D-glucans or xyloglucans, and other plant material containing cellulosic components. Endoglucanase activity can be determined by measuring reduction in substrate viscosity or increase in reducing ends determined by a reducing sugar assay (Zhang et al., 2006, Biotechnology Advances 24: 452-481). For purposes of the present invention, endoglucanase activity is determined using carboxymethyl cellulose (CMC) as substrate according to the procedure of Ghose, 1987, Pure and Appl. Chem. 59: 257-268, at pH 5, 40° C.

[0053] Expression: The term “expression” includes any step involved in the production of a polypeptide including, but not limited to, transcription, post-transcriptional modification, translation, post-translational modification, and secretion.

[0054] Expression vector: The term “expression vector” means a linear or circular DNA molecule that comprises a polynucleotide encoding a polypeptide and is operably linked to control sequences that provide for its expression.

[0055] Family 61 glycoside hydrolase: The term “Family 61 glycoside hydrolase” or “Family GH61” or “GH61” means a polypeptide falling into the glycoside hydrolase Family 61 according to Henrissat B., 1991, A classification of glycosyl hydrolases based on amino-acid sequence similarities, Biochem. J. 280: 309-316, and Henrissat B., and Bairoch A., 1996, Updating the sequence-based classification of glycosyl hydrolases, Biochem. J. 316: 695-696. The enzymes in this family were originally classified as a glycoside hydrolase family based on measurement of very weak endo-1,4-beta-D-glucanase activity in one family member. The structure and mode of action of these enzymes are non-canonical and they cannot be considered as bona fide glycosidases. However, they are kept in the CAZy classification on the basis of their capacity to enhance the breakdown of lignocellulose when used in conjunction with a cellulase or a mixture of cellulases.

[0056] Feruloyl esterase: The term “feruloyl esterase” means a 4-hydroxy-3-methoxycinnamoyl-sugar hydrolase (EC 3.1.1.73) that catalyzes the hydrolysis of 4-hydroxy-3-methoxycinnamoyl (feruloyl) groups from esterified sugar, which is usually arabinose in natural biomass substrates, to produce ferulate (4-hydroxy-3-methoxycinnamate). Feruloyl esterase is also known as ferulic acid esterase, hydroxycinnamoyl esterase, FAE-III, cinnamoyl ester hydrolase, FAEA, cinnAE, FAE-I, or FAE-II. For purposes of the present invention, feruloyl esterase activity is determined using 0.5 mM p-nitrophenylferulate as substrate in 50 mM sodium acetate pH 5.0. One unit of feruloyl esterase equals the amount of enzyme capable of releasing 1 pmole of p-nitrophenolate anion per minute at pH 5, 25° C.

[0057] Fragment: The term “fragment” means a polypeptide having one or more (e.g., several) amino acids absent from the amino and/or carboxyl terminus of a mature polypeptide. In one aspect, a fragment contains at least 85% of the amino acid residues, e.g., at least 90% of the amino acid residues or at least 95% of the amino acid residues of the mature chitin binding protein of SEQ ID NO: 2, SEQ ID NO: 4, SEQ ID NO: 6, SEQ ID NO: 8, SEQ ID NO: 10, SEQ ID NO: 12, SEQ ID NO: 14, SEQ ID NO: 16, SEQ ID NO: 18, SEQ ID NO: 20, SEQ ID NO: 22, SEQ ID NO: 24, SEQ ID NO: 26, SEQ ID NO: 28, SEQ ID NO: 30, SEQ ID NO: 32, SEQ ID NO: 34, SEQ ID NO: 36, SEQ ID NO: 38, SEQ ID NO: 40, SEQ ID NO: 42, SEQ ID NO: 44, SEQ ID NO: 46, SEQ ID NO: 48, SEQ ID NO: 50, SEQ ID NO: 52, SEQ ID NO: 54, SEQ ID NO: 56, SEQ ID NO: 58, SEQ ID NO: 60, SEQ ID NO: 62, SEQ ID NO: 64, SEQ ID NO: 66, SEQ ID NO: 68, SEQ ID NO: 70, SEQ ID NO: 72, SEQ ID NO: 74, SEQ ID NO: 76, SEQ ID NO: 78, SEQ ID NO: 80, SEQ ID NO: 82, SEQ ID NO: 84, SEQ ID NO: 86, SEQ ID NO: 88, SEQ ID NO: 90, SEQ ID NO: 92, SEQ ID NO: 94, SEQ ID NO: 96, SEQ ID NO: 98, SEQ ID NO: 100, SEQ ID NO: 102, SEQ ID NO: 104, SEQ ID NO: 106, SEQ ID NO: 108, SEQ ID NO: 110, SEQ ID NO: 112, SEQ ID NO: 114, SEQ ID NO: 116, SEQ ID NO: 118, SEQ ID NO: 120, SEQ ID NO: 122, SEQ ID NO: 124, SEQ ID NO: 126, SEQ ID NO: 128, SEQ ID NO: 130, SEQ ID NO: 132, SEQ ID NO: 134, SEQ ID NO: 136, SEQ ID NO: 138, SEQ ID NO: 140, SEQ ID NO: 142, SEQ ID NO: 144, SEQ ID NO: 146, SEQ ID NO: 148, SEQ ID NO: 150, SEQ ID NO: 152, SEQ ID NO: 154, SEQ ID NO: 156, SEQ ID NO: 158, SEQ ID NO: 160, SEQ ID NO: 162, SEQ ID NO: 164, SEQ ID NO: 166, SEQ ID NO: 168, SEQ ID NO: 170, SEQ ID NO: 172, SEQ ID NO: 174, SEQ ID NO: 176, SEQ ID NO: 178, or SEQ ID NO: 180; or the CBM33 thereof.

[0058] Hemicellulolytic enzyme or hemicellulase: The term “hemicellulolytic enzyme” or “hemicellulase” means one or more (e.g., several) enzymes that hydrolyze a hemicellulosic material. See, for example, Shallom, D. and Shoham, Y. Microbial hemicellulases. Current Opinion In Microbiology, 2003, 6(3): 219-228). Hemicellulases are key components in the degradation of plant biomass. Examples of hemicellulases include, but are not limited to, an acetylmannan esterase, an acetylxylan esterase, an arabinanase, an arabinofuranosidase, a coumaric acid esterase, a feruloyl esterase, a galactosidase, a glucuronidase, a glucuronoyl esterase, a mannanase, a mannosidase, a xylanase, and a xylosidase. The substrates of these enzymes, the hemicelluloses, are a heterogeneous group of branched and linear polysaccharides that are bound via hydrogen bonds to the cellulose microfibrils in the plant cell wall, crosslinking them into a robust network. Hemicelluloses are also covalently attached to lignin, forming together with cellulose a highly complex structure. The variable structure and organization of hemicelluloses require the concerted action of many enzymes for its complete degradation. The catalytic modules of hemicellulases are either glycoside hydrolases (GHs) that hydrolyze glycosidic bonds, or carbohydrate esterases (CEs), which hydrolyze ester linkages of acetate or ferulic acid side groups. These catalytic modules, based on homology of their primary sequence, can be assigned into GH and CE families. Some families, with an overall similar fold, can be further grouped into clans, marked alphabetically (e.g., GH-A). A most informative and updated classification of these and other carbohydrate active enzymes is available in the Carbohydrate-Active Enzymes (CAZy) database. Hemicellulolytic enzyme activities can be measured according to Ghose and Bisaria, 1987, Pure & Appl. Chem. 59: 1739-1752, at a suitable temperature, e.g., 50° C., 55° C., 60° C., or 65° C., and pH, e.g., 5.0 or 5.5.

[0059] High stringency conditions: The term “high stringency conditions” means for probes of at least 100 nucleotides in length, prehybridization and hybridization at 42° C. in 5×SSPE, 0.3% SDS, 200 micrograms/ml sheared and denatured salmon sperm DNA, and 50% formamide, following standard Southern blotting procedures for 12 to 24 hours. The carrier material is finally washed three times each for 15 minutes using 2×SSC, 0.2% SDS at 65° C.

[0060] Host cell: The term “host cell” means any cell type that is susceptible to transformation, transfection, transduction, or the like with a nucleic acid construct or expression vector comprising a polynucleotide. The term “host cell” encompasses any progeny of a parent cell that is not identical to the parent cell due to mutations that occur during replication.

[0061] Isolated: The term “isolated” means a substance in a form or environment that does not occur in nature. Non-limiting examples of isolated substances include (1) any non-naturally occurring substance, (2) any substance including, but not limited to, any enzyme, variant, nucleic acid, protein, peptide or cofactor, that is at least partially removed from one or more or all of the naturally occurring constituents with which it is associated in nature; (3) any substance modified by the hand of man relative to that substance found in nature; or (4) any substance modified by increasing the amount of the substance relative to other components with which it is naturally associated (e.g., recombinant production in a host cell; multiple copies of a gene encoding the substance; and use of a stronger promoter than the promoter naturally associated with the gene encoding the substance).

[0062] Low stringency conditions: The term “low stringency conditions” means for probes of at least 100 nucleotides in length, prehybridization and hybridization at 42° C. in 5×SSPE, 0.3% SDS, 200 micrograms/ml sheared and denatured salmon sperm DNA, and 25% formamide, following standard Southern blotting procedures for 12 to 24 hours. The carrier material is finally washed three times each for 15 minutes using 2×SSC, 0.2% SDS at 50° C.

[0063] Mature chitin binding protein: The term “mature chitin binding protein” means a polypeptide in its final form following translation and any post-translational modifications, such as N-terminal processing, C-terminal truncation, glycosylation, phosphorylation, etc. In one aspect, the mature chitin binding protein is amino acids 19 to 344 of SEQ ID NO: 2, amino acids 32 to 203 of SEQ ID NO: 4, amino acids 32 to 226 of SEQ ID NO: 6, amino acids 32 to 203 of SEQ ID NO: 8, amino acids 41 to 456 of SEQ ID NO: 10, amino acids 41 to 456 of SEQ ID NO: 12, amino acids 41 to 456 of SEQ ID NO: 14, amino acids 41 to 456 of SEQ ID NO: 16, amino acids 41 to 455 of SEQ ID NO: 18, amino acids 41 to 456 of SEQ ID NO: 20, amino acids 41 to 456 of SEQ ID NO: 22, amino acids 41 to 455 of SEQ ID NO: 24, amino acids 41 to 455 of SEQ ID NO: 26, amino acids 51 to 467 of SEQ ID NO: 28, amino acids 41 to 456 of SEQ ID NO: 30, amino acids 41 to 455 of SEQ ID NO: 32, amino acids 43 to 457 of SEQ ID NO: 34, amino acids 43 to 457 of SEQ ID NO: 36, amino acids 41 to 456 of SEQ ID NO: 38, amino acids 41 to 455 of SEQ ID NO: 40, amino acids 41 to 455 of SEQ ID NO: 42, amino acids 41 to 455 of SEQ ID NO: 44, amino acids 41 to 455 of SEQ ID NO: 46, amino acids 43 to 457 of SEQ ID NO: 48, amino acids 41 to 455 of SEQ ID NO: 50, amino acids 41 to 455 of SEQ ID NO: 52, amino acids 41 to 455 of SEQ ID NO: 54, amino acids 41 to 455 of SEQ ID NO: 56, amino acids 41 to 455 of SEQ ID NO: 58, amino acids 41 to 455 of SEQ ID NO: 60, amino acids 41 to 455 of SEQ ID NO: 62, amino acids 41 to 418 of SEQ ID NO: 64, amino acids 46 to 463 of SEQ ID NO: 66, amino acids 33 to 450 of SEQ ID NO: 68, amino acids 41 to 458 of SEQ ID NO: 70, amino acids 41 to 455 of SEQ ID NO: 72, amino acids 41 to 455 of SEQ ID NO: 74, amino acids 41 to 455 of SEQ ID NO: 76, amino acids 41 to 456 of SEQ ID NO: 78, amino acids 41 to 455 of SEQ ID NO: 80, amino acids 41 to 455 of SEQ ID NO: 82, amino acids 41 to 455 of SEQ ID NO: 84, amino acids 41 to 455 of SEQ ID NO: 86, amino acids 41 to 455 of SEQ ID NO: 88, amino acids 41 to 455 of SEQ ID NO: 90, amino acids 41 to 458 of SEQ ID NO: 92, amino acids 41 to 455 of SEQ ID NO: 94, amino acids 33 to 450 of SEQ ID NO: 96, amino acids 33 to 450 of SEQ ID NO: 98, amino acids 43 to 232 of SEQ ID NO: 100, amino acids 41 to 458 of SEQ ID NO: 102, amino acids 41 to 455 of SEQ ID NO: 104, amino acids 41 to 458 of SEQ ID NO: 106, amino acids 33 to 450 of SEQ ID NO: 108, amino acids 41 to 455 of SEQ ID NO: 110, amino acids 41 to 458 of SEQ ID NO: 112, amino acids 41 to 455 of SEQ ID NO: 114, amino acids 41 to 455 of SEQ ID NO: 116, amino acids 41 to 455 of SEQ ID NO: 118, amino acids 41 to 455 of SEQ ID NO: 120, amino acids 41 to 455 of SEQ ID NO: 122, amino acids 41 to 458 of SEQ ID NO: 124, amino acids 41 to 458 of SEQ ID NO: 126, amino acids 41 to 458 of SEQ ID NO: 128, amino acids 41 to 455 of SEQ ID NO: 130, amino acids 41 to 455 of SEQ ID NO: 132, amino acids 33 to 450 of SEQ ID NO: 134, amino acids 33 to 450 of SEQ ID NO: 136, amino acids 33 to 450 of SEQ ID NO: 138, amino acids 41 to 458 of SEQ ID NO: 140, amino acids 41 to 459 of SEQ ID NO: 142, amino acids 41 to 458 of SEQ ID NO: 144, amino acids 41 to 458 of SEQ ID NO: 146, amino acids 41 to 455 of SEQ ID NO: 148, amino acids 30 to 444 of SEQ ID NO: 150, amino acids 30 to 444 of SEQ ID NO: 152, amino acids 30 to 444 of SEQ ID NO: 154, amino acids 41 to 455 of SEQ ID NO: 156, amino acids 41 to 455 of SEQ ID NO: 158, amino acids 41 to 458 of SEQ ID NO: 160, amino acids 41 to 455 of SEQ ID NO: 162, amino acids 41 to 458 of SEQ ID NO: 164, amino acids 41 to 455 of SEQ ID NO: 166, amino acids 35 to 452 of SEQ ID NO: 168, amino acids 39 to 457 of SEQ ID NO: 170, amino acids 35 to 427 of SEQ ID NO: 172, amino acids 37 to 220 of SEQ ID NO: 174, or amino acids 40 to 185 of SEQ ID NO: 176 based on the SignalP program (Nielsen et al., 1997, Protein Engineering 10:1-6) that predicts amino acids 1 to 18 of SEQ ID NO: 2, amino acids 1 to 31 of SEQ ID NO: 4, amino acids 1 to 31 of SEQ ID NO: 6, amino acids 1 to 31 of SEQ ID NO: 8, amino acids 1 to 40 of SEQ ID NO: 10, amino acids 1 to 40 of SEQ ID NO: 12, amino acids 1 to 40 of SEQ ID NO: 14, amino acids 1 to 40 of SEQ ID NO: 16, amino acids 1 to 40 of SEQ ID NO: 18, amino acids 1 to 40 of SEQ ID NO: 20, amino acids 1 to 40 of SEQ ID NO: 22, amino acids 1 to 40 of SEQ ID NO: 24, amino acids 1 to 40 of SEQ ID NO: 26, amino acids 1 to 40 of SEQ ID NO: 28, amino acids 1 to 40 of SEQ ID NO: 30, amino acids 1 to 40 of SEQ ID NO: 32, amino acids 1 to 42 of SEQ ID NO: 34, amino acids 1 to 42 of SEQ ID NO: 36, amino acids 1 to 40 of SEQ ID NO: 38, amino acids 1 to 40 of SEQ ID NO: 40, amino acids 1 to 40 of SEQ ID NO: 42, amino acids 1 to 40 of SEQ ID NO: 44, amino acids 1 to 40 of SEQ ID NO: 46, amino acids 1 to 42 of SEQ ID NO: 48, amino acids 1 to 40 of SEQ ID NO: 50, amino acids 1 to 40 of SEQ ID NO: 52, amino acids 1 to 40 of SEQ ID NO: 54, amino acids 1 to 40 of SEQ ID NO: 56, amino acids 1 to 40 of SEQ ID NO: 58, amino acids 1 to 40 of SEQ ID NO: 60, amino acids 1 to 40 of SEQ ID NO: 62, amino acids 1 to 40 of SEQ ID NO: 64, amino acids 1 to 45 of SEQ ID NO: 66, amino acids 1 to 32 of SEQ ID NO: 68, amino acids 1 to 40 of SEQ ID NO: 70, amino acids 1 to 40 of SEQ ID NO: 72, amino acids 1 to 40 of SEQ ID NO: 74, amino acids 1 to 40 of SEQ ID NO: 76, amino acids 1 to 40 of SEQ ID NO: 78, amino acids 1 to 40 of SEQ ID NO: 80, amino acids 1 to 40 of SEQ ID NO: 82, amino acids 1 to 40 of SEQ ID NO: 84, amino acids 1 to 40 of SEQ ID NO: 86, amino acids 1 to 40 of SEQ ID NO: 88, amino acids 1 to 40 of SEQ ID NO: 90, amino acids 1 to 40 of SEQ ID NO: 92, amino acids 1 to 40 of SEQ ID NO: 94, amino acids 1 to 32 of SEQ ID NO: 96, amino acids 1 to 32 of SEQ ID NO: 98, amino acids 1 to 42 of SEQ ID NO: 100, amino acids 1 to 40 of SEQ ID NO: 102, amino acids 1 to 40 of SEQ ID NO: 104, amino acids 1 to 40 of SEQ ID NO: 106, amino acids 1 to 32 of SEQ ID NO: 108, amino acids 1 to 40 of SEQ ID NO: 110, amino acids 1 to 40 of SEQ ID NO: 112, amino acids 1 to 40 of SEQ ID NO: 114, amino acids 1 to 40 of SEQ ID NO: 116, amino acids 1 to 40 of SEQ ID NO: 118, amino acids 1 to 40 of SEQ ID NO: 120, amino acids 1 to 40 of SEQ ID NO: 122, amino acids 1 to 40 of SEQ ID NO: 124, amino acids 1 to 40 of SEQ ID NO: 126, amino acids 1 to 40 of SEQ ID NO: 128, amino acids 1 to 40 of SEQ ID NO: 130, amino acids 1 to 40 of SEQ ID NO: 132, amino acids 1 to 32 of SEQ ID NO: 134, amino acids 1 to 32 of SEQ ID NO: 136, amino acids 1 to 32 of SEQ ID NO: 138, amino acids 1 to 40 of SEQ ID NO: 140, amino acids 1 to 40 of SEQ ID NO: 142, amino acids 1 to 40 of SEQ ID NO: 144, amino acids 1 to 40 of SEQ ID NO: 146, amino acids 1 to 40 of SEQ ID NO: 148, amino acids 1 to 29 of SEQ ID NO: 150, amino acids 1 to 29 of SEQ ID NO: 152, amino acids 1 to 29 of SEQ ID NO: 154, amino acids 1 to 40 of SEQ ID NO: 156, amino acids 1 to 40 of SEQ ID NO: 158, amino acids 1 to 40 of SEQ ID NO: 160, amino acids 1 to 40 of SEQ ID NO: 162, amino acids 1 to 40 of SEQ ID NO: 164, amino acids 1 to 40 of SEQ ID NO: 166, amino acids 1 to 34 of SEQ ID NO: 168, amino acids 1 to 38 of SEQ ID NO: 170, amino acids 1 to 34 of SEQ ID NO: 172, amino acids 1 to 36 of SEQ ID NO: 174, or amino acids 1 to 40 of SEQ ID NO: 176 are a signal peptide. In another aspect, the mature chitin binding protein is amino acids 1 to 387 of SEQ ID NO: 178 or amino acids 1 to 387 of SEQ ID NO: 180 based on the SignalP program (Nielsen et al., 1997, Protein Engineering 10:1-6) that predicts there is no signal peptide.

[0064] Mature chitin binding protein coding sequence: The term “mature chitin binding protein coding sequence” means a polynucleotide that encodes a mature chitin binding protein. In one aspect, the mature chitin binding protein coding sequence is nucleotides 55 to 1086 of SEQ ID NO: 1, nucleotides 94 to 609 of SEQ ID NO: 3, nucleotides 94 to 678 of SEQ ID NO: 5, nucleotides 121 to 609 of SEQ ID NO: 7, nucleotides 121 to 1368 of SEQ ID NO: 9, nucleotides 121 to 1368 of SEQ ID NO: 11, nucleotides 121 to 1368 of SEQ ID NO: 13, nucleotides 121 to 1368 of SEQ ID NO: 15, nucleotides 121 to 1365 of SEQ ID NO: 17, nucleotides 121 to 1368 of SEQ ID NO: 19, nucleotides 121 to 1368 of SEQ ID NO: 21, nucleotides 121 to 1365 of SEQ ID NO: 23, nucleotides 121 to 1401 of SEQ ID NO: 25, nucleotides 121 to 1368 of SEQ ID NO: 27, nucleotides 121 to 1368 of SEQ ID NO: 29, nucleotides 121 to 1365 of SEQ ID NO: 31, nucleotides 127 to 1371 of SEQ ID NO: 33, nucleotides 127 to 1371 of SEQ ID NO: 35, nucleotides 121 to 1317 of SEQ ID NO: 37, nucleotides 121 to 1365 of SEQ ID NO: 39, nucleotides 121 to 1365 of SEQ ID NO: 41, nucleotides 121 to 1365 of SEQ ID NO: 43, nucleotides 121 to 1365 of SEQ ID NO: 45, nucleotides 127 to 1371 of SEQ ID NO: 47, nucleotides 121 to 1365 of SEQ ID NO: 49, nucleotides 121 to 1365 of SEQ ID NO: 51, nucleotides 121 to 1365 of SEQ ID NO: 53, nucleotides 121 to 1365 of SEQ ID NO: 55, nucleotides 121 to 1365 of SEQ ID NO: 57, nucleotides 121 to 1365 of SEQ ID NO: 59, nucleotides 121 to 1365 of SEQ ID NO: 61, nucleotides 121 to 1254 of SEQ ID NO: 63, nucleotides 136 to 1389 of SEQ ID NO: 65, nucleotides 97 to 1350 of SEQ ID NO: 67, nucleotides 121 to 1374 of SEQ ID NO: 69, nucleotides 121 to 1365 of SEQ ID NO: 71, nucleotides 121 to 1365 of SEQ ID NO: 73, nucleotides 121 to 1365 of SEQ ID NO: 75, nucleotides 121 to 1365 of SEQ ID NO: 77, nucleotides 121 to 1365 of SEQ ID NO: 79, nucleotides 121 to 1365 of SEQ ID NO: 81, nucleotides 121 to 1365 of SEQ ID NO: 83, nucleotides 121 to 1365 of SEQ ID NO: 85, nucleotides 121 to 1365 of SEQ ID NO: 87, nucleotides 121 to 1365 of SEQ ID NO: 89, nucleotides 121 to 1374 of SEQ ID NO: 91, nucleotides 121 to 1365 of SEQ ID NO: 93, nucleotides 97 to 1350 of SEQ ID NO: 95, nucleotides 97 to 1350 of SEQ ID NO: 97, nucleotides 127 to 696 of SEQ ID NO: 99, nucleotides 121 to 1374 of SEQ ID NO: 101, nucleotides 121 to 1365 of SEQ ID NO: 103, nucleotides 121 to 1374 of SEQ ID NO: 105, nucleotides 97 to 1350 of SEQ ID NO: 107, nucleotides 121 to 1365 of SEQ ID NO: 109, nucleotides 121 to 1374 of SEQ ID NO: 111, nucleotides 121 to 1365 of SEQ ID NO: 113, nucleotides 121 to 1365 of SEQ ID NO: 115, nucleotides 121 to 1365 of SEQ ID NO: 117, nucleotides 121 to 1365 of SEQ ID NO: 119, nucleotides 121 to 1365 of SEQ ID NO: 121, nucleotides 121 to 1374 of SEQ ID NO: 123, nucleotides 121 to 1374 of SEQ ID NO: 125, nucleotides 121 to 1374 of SEQ ID NO: 127, nucleotides 121 to 1365 of SEQ ID NO: 129, nucleotides 121 to 1365 of SEQ ID NO: 131, nucleotides 97 to 1350 of SEQ ID NO: 133, nucleotides 97 to 1350 of SEQ ID NO: 135, nucleotides 97 to 1350 of SEQ ID NO: 137, nucleotides 121 to 1374 of SEQ ID NO: 139, nucleotides 121 to 1377 of SEQ ID NO: 141, nucleotides 121 to 1374 of SEQ ID NO: 143, nucleotides 121 to 1374 of SEQ ID NO: 145, nucleotides 121 to 1374 of SEQ ID NO: 147, nucleotides 88 to 1332 of SEQ ID NO: 149, nucleotides 88 to 1332 of SEQ ID NO: 151, nucleotides 88 to 1332 of SEQ ID NO: 153, nucleotides 121 to 1365 of SEQ ID NO: 155, nucleotides 121 to 1365 of SEQ ID NO: 157, nucleotides 121 to 1374 of SEQ ID NO: 159, nucleotides 121 to 1365 of SEQ ID NO: 161, nucleotides 121 to 1374 of SEQ ID NO: 163, nucleotides 121 to 1365 of SEQ ID NO: 165, nucleotides 103 to 1356 of SEQ ID NO: 167, nucleotides 115 to 1371 of SEQ ID NO: 169, nucleotides 103 to 1281 of SEQ ID NO: 171, nucleotides 109 to 660 of SEQ ID NO: 173, or nucleotides 120 to 555 of SEQ ID NO: 175 based on the SignalP program (Nielsen et al., 1997, supra) that predicts nucleotides 1 to 54 of SEQ ID NO: 1, nucleotides 1 to 93 of SEQ ID NO: 3, nucleotides 1 to 93 of SEQ ID NO: 5, nucleotides 1 to 93 of SEQ ID NO: 7, nucleotides 1 to 120 of SEQ ID NO: 9, nucleotides 1 to 120 of SEQ ID NO: 11, nucleotides 1 to 120 of SEQ ID NO: 13, nucleotides 1 to 120 of SEQ ID NO: 15, nucleotides 1 to 120 of SEQ ID NO: 17, nucleotides 1 to 120 of SEQ ID NO: 19, nucleotides 1 to 120 of SEQ ID NO: 21, nucleotides 1 to 120 of SEQ ID NO: 23, nucleotides 1 to 120 of SEQ ID NO: 25, nucleotides 1 to 120 of SEQ ID NO: 27, nucleotides 1 to 120 of SEQ ID NO: 29, nucleotides 1 to 120 of SEQ ID NO: 31, nucleotides 1 to 126 of SEQ ID NO: 33, nucleotides 1 to 126 of SEQ ID NO: 35, nucleotides 1 to 120 of SEQ ID NO: 37, nucleotides 1 to 120 of SEQ ID NO: 39, nucleotides 1 to 120 of SEQ ID NO: 41, nucleotides 1 to 120 of SEQ ID NO: 43, nucleotides 1 to 120 of SEQ ID NO: 45, nucleotides 1 to 126 of SEQ ID NO: 47, nucleotides 1 to 120 of SEQ ID NO: 49, nucleotides 1 to 120 of SEQ ID NO: 51, nucleotides 1 to 120 of SEQ ID NO: 53, nucleotides 1 to 120 of SEQ ID NO: 55, nucleotides 1 to 120 of SEQ ID NO: 57, nucleotides 1 to 120 of SEQ ID NO: 59, nucleotides 1 to 120 of SEQ ID NO: 61, nucleotides 1 to 120 of SEQ ID NO: 63, nucleotides 1 to 135 of SEQ ID NO: 65, nucleotides 1 to 96 of SEQ ID NO: 67, nucleotides 1 to 120 of SEQ ID NO: 69, nucleotides 1 to 120 of SEQ ID NO: 71, nucleotides 1 to 120 of SEQ ID NO: 73, nucleotides 1 to 120 of SEQ ID NO: 75, nucleotides 1 to 120 of SEQ ID NO: 77, nucleotides 1 to 120 of SEQ ID NO: 79, nucleotides 1 to 120 of SEQ ID NO: 81, nucleotides 1 to 120 of SEQ ID NO: 83, nucleotides 1 to 120 of SEQ ID NO: 85, nucleotides 1 to 120 of SEQ ID NO: 87, nucleotides 1 to 120 of SEQ ID NO: 89, nucleotides 1 to 120 of SEQ ID NO: 91, nucleotides 1 to 120 of SEQ ID NO: 93, nucleotides 1 to 96 of SEQ ID NO: 95, nucleotides 1 to 96 of SEQ ID NO: 97, nucleotides 1 to 126 of SEQ ID NO: 99, nucleotides 1 to 120 of SEQ ID NO: 101, nucleotides 1 to 120 of SEQ ID NO: 103, nucleotides 1 to 120 of SEQ ID NO: 105, nucleotides 1 to 96 of SEQ ID NO: 107, nucleotides 1 to 120 of SEQ ID NO: 109, nucleotides 1 to 120 of SEQ ID NO: 111, nucleotides 1 to 120 of SEQ ID NO: 113, nucleotides 1 to 120 of SEQ ID NO: 115, nucleotides 1 to 120 of SEQ ID NO: 117, nucleotides 1 to 120 of SEQ ID NO: 119, nucleotides 1 to 120 of SEQ ID NO: 121, nucleotides 1 to 120 of SEQ ID NO: 123, nucleotides 1 to 120 of SEQ ID NO: 125, nucleotides 1 to 120 of SEQ ID NO: 127, nucleotides 1 to 120 of SEQ ID NO: 129, nucleotides 1 to 120 of SEQ ID NO: 131, nucleotides 1 to 96 of SEQ ID NO: 133, nucleotides 1 to 96 of SEQ ID NO: 135, nucleotides 1 to 96 of SEQ ID NO: 137, nucleotides 1 to 120 of SEQ ID NO: 139, nucleotides 1 to 120 of SEQ ID NO: 141, nucleotides 1 to 120 of SEQ ID NO: 143, nucleotides 1 to 120 of SEQ ID NO: 145, nucleotides 1 to 120 of SEQ ID NO: 147, nucleotides 1 to 87 of SEQ ID NO: 149, nucleotides 1 to 87 of SEQ ID NO: 151, nucleotides 1 to 87 of SEQ ID NO: 153, nucleotides 1 to 120 of SEQ ID NO: 155, nucleotides 1 to 120 of SEQ ID NO: 157, nucleotides 1 to 120 of SEQ ID NO: 159, nucleotides 1 to 120 of SEQ ID NO: 161, nucleotides 1 to 120 of SEQ ID NO: 163, nucleotides 1 to 120 of SEQ ID NO: 165, nucleotides 1 to 102 of SEQ ID NO: 167, nucleotides 1 to 114 of SEQ ID NO: 169, nucleotides 1 to 102 of SEQ ID NO: 171, nucleotides 1 to 108 of SEQ ID NO: 173, or nucleotides 1 to 120 of SEQ ID NO: 175 encode a signal peptide. In another aspect, the mature chitin binding protein coding sequence is nucleotides 1 to 1161 of SEQ ID NO: 177 or nucleotides 1 to 1161 of SEQ ID NO: 179 based on the SignalP program (Nielsen et al., 1997, supra) that predicts there is no signal peptide.

[0065] Medium stringency conditions: The term “medium stringency conditions” means for probes of at least 100 nucleotides in length, prehybridization and hybridization at 42° C. in 5×SSPE, 0.3% SDS, 200 micrograms/ml sheared and denatured salmon sperm DNA, and 35% formamide, following standard Southern blotting procedures for 12 to 24 hours. The carrier material is finally washed three times each for 15 minutes using 2×SSC, 0.2% SDS at 55° C.

[0066] Medium-high stringency conditions: The term “medium-high stringency conditions” means for probes of at least 100 nucleotides in length, prehybridization and hybridization at 42° C. in 5×SSPE, 0.3% SDS, 200 micrograms/ml sheared and denatured salmon sperm DNA, and 35% formamide, following standard Southern blotting procedures for 12 to 24 hours. The carrier material is finally washed three times each for 15 minutes using 2×SSC, 0.2% SDS at 60° C.

[0067] Nucleic acid construct: The term “nucleic acid construct” means a nucleic acid molecule, either single- or double-stranded, which is isolated from a naturally occurring gene or is modified to contain segments of nucleic acids in a manner that would not otherwise exist in nature or which is synthetic, which comprises one or more (e.g., several) control sequences.

[0068] Operably linked: The term “operably linked” means a configuration in which a control sequence is placed at an appropriate position relative to the coding sequence of a polynucleotide such that the control sequence directs expression of the coding sequence.

[0069] Polypeptide having cellulolytic enhancing activity: The term “polypeptide having cellulolytic enhancing activity” means a GH61 polypeptide that catalyzes the enhancement of the hydrolysis of a cellulosic material by enzyme having cellulolytic activity. For purposes of the present invention, cellulolytic enhancing activity is determined by measuring the increase in reducing sugars or the increase of the total of cellobiose and glucose from the hydrolysis of a cellulosic material by cellulolytic enzyme under the following conditions: 1-50 mg of total protein/g of cellulose in PCS, wherein total protein is comprised of 50-99.5% w/w cellulolytic enzyme protein and 0.5-50% w/w protein of a GH61 polypeptide having cellulolytic enhancing activity for 1-7 days at a suitable temperature, e.g., 50° C., 55° C., 60° C., or 65° C., and pH, e.g., 5.0 or 5.5, compared to a control hydrolysis with equal total protein loading without cellulolytic enhancing activity (1-50 mg of cellulolytic protein/g of cellulose in PCS). In a preferred aspect, a mixture of CELLUCLAST® 1.5 L (Novozymes NS, Bagsvrd, Denmark) in the presence of 2-3% of total protein weight Aspergillus oryzae beta-glucosidase (recombinantly produced in Aspergillus oryzae according to WO 02/095014) or 2-3% of total protein weight Aspergillus fumigatus beta-glucosidase (recombinantly produced in Aspergillus oryzae as described in WO 2002/095014) of cellulase protein loading is used as the source of the cellulolytic activity.

[0070] The GH61 polypeptides having cellulolytic enhancing activity enhance the hydrolysis of a cellulosic material catalyzed by enzyme having cellulolytic activity by reducing the amount of cellulolytic enzyme required to reach the same degree of hydrolysis preferably at least 1.01-fold, e.g., at least 1.05-fold, at least 1.10-fold, at least 1.25-fold, at least 1.5-fold, at least 2-fold, at least 3-fold, at least 4-fold, at least 5-fold, at least 10-fold, or at least 20-fold.

[0071] Pretreated corn stover: The term “PCS” or “Pretreated Corn Stover” means a cellulosic material derived from corn stover by treatment with heat and dilute sulfuric acid, alkaline pretreatment, or neutral pretreatment.

[0072] Sequence identity: The relatedness between two amino acid sequences or between two nucleotide sequences is described by the parameter “sequence identity”.

[0073] For purposes of the present invention, the sequence identity between two amino acid sequences is determined using the Needleman-Wunsch algorithm (Needleman and Wunsch, 1970, J. Mol. Biol. 48: 443-453) as implemented in the Needle program of the EMBOSS package (EMBOSS: The European Molecular Biology Open Software Suite, Rice et al., 2000, Trends Genet. 16: 276-277), preferably version 5.0.0 or later. The parameters used are gap open penalty of 10, gap extension penalty of 0.5, and the EBLOSUM62 (EMBOSS version of BLOSUM62) substitution matrix. The output of Needle labeled “longest identity” (obtained using the -nobrief option) is used as the percent identity and is calculated as follows:

(Identical Residues×100)/(Length of Alignment−Total Number of Gaps in Alignment)

[0074] For purposes of the present invention, the sequence identity between two deoxyribonucleotide sequences is determined using the Needleman-Wunsch algorithm (Needleman and Wunsch, 1970, supra) as implemented in the Needle program of the EMBOSS package (EMBOSS: The European Molecular Biology Open Software Suite, Rice et al., 2000, supra), preferably version 5.0.0 or later. The parameters used are gap open penalty of 10, gap extension penalty of 0.5, and the EDNAFULL (EMBOSS version of NCB! NUC4.4) substitution matrix. The output of Needle labeled “longest identity” (obtained using the -nobrief option) is used as the percent identity and is calculated as follows:

(Identical Deoxyribonucleotides×100)/(Length of Alignment−Total Number of Gaps in Alignment)

[0075] Subsequence: The term “subsequence” means a polynucleotide having one or more (e.g., several) nucleotides absent from the 5′ and/or 3′ end of a mature chitin binding protein coding sequence; wherein the subsequence encodes a fragment having chitin binding activity. In one aspect, a subsequence contains at least 85% of the nucleotides, e.g., at least 90% of the nucleotides or at least 95% of the nucleotides of SEQ ID NO: 1, SEQ ID NO: 3, SEQ ID NO: 5, SEQ ID NO: 7, SEQ ID NO: 9, SEQ ID NO: 11, SEQ ID NO: 13, SEQ ID NO: 15, SEQ ID NO: 17, SEQ ID NO: 19, SEQ ID NO: 21, SEQ ID NO: 23, SEQ ID NO: 25, SEQ ID NO: 27, SEQ ID NO: 29, SEQ ID NO: 31, SEQ ID NO: 33, SEQ ID NO: 35, SEQ ID NO: 37, SEQ ID NO: 39, SEQ ID NO: 41, SEQ ID NO: 43, SEQ ID NO: 45, SEQ ID NO: 47, SEQ ID NO: 49, SEQ ID NO: 51, SEQ ID NO: 53, SEQ ID NO: 55, SEQ ID NO: 57, SEQ ID NO: 59, SEQ ID NO: 61, SEQ ID NO: 63, SEQ ID NO: 65, SEQ ID NO: 67, SEQ ID NO: 69, SEQ ID NO: 71, SEQ ID NO: 73, SEQ ID NO: 75, SEQ ID NO: 77, SEQ ID NO: 79, SEQ ID NO: 81, SEQ ID NO: 83, SEQ ID NO: 85, SEQ ID NO: 87, SEQ ID NO: 89, SEQ ID NO: 91, SEQ ID NO: 93, SEQ ID NO: 95, SEQ ID NO: 97, SEQ ID NO: 99, SEQ ID NO: 101, SEQ ID NO: 103, SEQ ID NO: 105, SEQ ID NO: 107, SEQ ID NO: 109, SEQ ID NO: 111, SEQ ID NO: 113, SEQ ID NO: 115, SEQ ID NO: 117, SEQ ID NO: 119, SEQ ID NO: 121, SEQ ID NO: 123, SEQ ID NO: 125, SEQ ID NO: 127, SEQ ID NO: 129, SEQ ID NO: 131, SEQ ID NO: 133, SEQ ID NO: 135, SEQ ID NO: 137, SEQ ID NO: 139, SEQ ID NO: 141, SEQ ID NO: 143, SEQ ID NO: 145, SEQ ID NO: 147, SEQ ID NO: 149, SEQ ID NO: 151, SEQ ID NO: 153, SEQ ID NO: 155, SEQ ID NO: 157, SEQ ID NO: 159, SEQ ID NO: 161, SEQ ID NO: 163, SEQ ID NO: 165, SEQ ID NO: 167, SEQ ID NO: 169, SEQ ID NO: 171, SEQ ID NO: 173, SEQ ID NO: 175, SEQ ID NO: 177, or SEQ ID NO: 179; or the CBM33 coding sequence thereof.

[0076] Variant: The term “variant” means a chitin binding protein comprising an alteration, i.e., a substitution, insertion, and/or deletion at one or more (e.g., several) positions. A substitution means a replacement of the amino acid occupying a position with a different amino acid; a deletion means removal of the amino acid occupying a position; and an insertion means adding an amino acid adjacent to and immediately following the amino acid occupying a position.

[0077] Very high stringency conditions: The term “very high stringency conditions” means for probes of at least 100 nucleotides in length, prehybridization and hybridization at 42° C. in 5×SSPE, 0.3% SDS, 200 micrograms/ml sheared and denatured salmon sperm DNA, and 50% formamide, following standard Southern blotting procedures for 12 to 24 hours. The carrier material is finally washed three times each for 15 minutes using 2×SSC, 0.2% SDS at 70° C.

[0078] Very low stringency conditions: The term “very low stringency conditions” means for probes of at least 100 nucleotides in length, prehybridization and hybridization at 42° C. in 5×SSPE, 0.3% SDS, 200 micrograms/ml sheared and denatured salmon sperm DNA, and 25% formamide, following standard Southern blotting procedures for 12 to 24 hours. The carrier material is finally washed three times each for 15 minutes using 2×SSC, 0.2% SDS at 45° C.

[0079] Xylan degrading activity or xylanolytic activity: The term “xylan degrading activity” or “xylanolytic activity” means a biological activity that hydrolyzes xylan-containing material. The two basic approaches for measuring xylanolytic activity include: (1) measuring the total xylanolytic activity, and (2) measuring the individual xylanolytic activities (e.g., endoxylanases, beta-xylosidases, arabinofuranosidases, alpha-glucuronidases, acetylxylan esterases, feruloyl esterases, and alpha-glucuronyl esterases). Recent progress in assays of xylanolytic enzymes was summarized in several publications including Biely and Puchard, Recent progress in the assays of xylanolytic enzymes, 2006, Journal of the Science of Food and Agriculture 86(11): 1636-1647; Spanikova and Biely, 2006, Glucuronoyl esterase—Novel carbohydrate esterase produced by Schizophyllum commune, FEBS Letters 580(19): 4597-4601; Herrmann, Vrsanska, Jurickova, Hirsch, Biely, and Kubicek, 1997, The beta-D-xylosidase of Trichoderma reesei is a multifunctional beta-D-xylan xylohydrolase, Biochemical Journal 321: 375-381.

[0080] Total xylan degrading activity can be measured by determining the reducing sugars formed from various types of xylan, including, for example, oat spelt, beechwood, and larchwood xylans, or by photometric determination of dyed xylan fragments released from various covalently dyed xylans. The most common total xylanolytic activity assay is based on production of reducing sugars from polymeric 4-O-methyl glucuronoxylan as described in Bailey, Biely, Poutanen, 1992, Interlaboratory testing of methods for assay of xylanase activity, Journal of Biotechnology 23(3): 257-270. Xylanase activity can also be determined with 0.2% AZCL-arabinoxylan as substrate in 0.01% TRITON® X-100 (4-(1,1,3,3-tetramethylbutyl)phenyl-polyethylene glycol) and 200 mM sodium phosphate buffer pH 6 at 37° C. One unit of xylanase activity is defined as 1.0 mmole of azurine produced per minute at 37° C., pH 6 from 0.2% AZCL-arabinoxylan as substrate in 200 mM sodium phosphate pH 6 buffer.

[0081] For purposes of the present invention, xylan degrading activity is determined by measuring the increase in hydrolysis of birchwood xylan (Sigma Chemical Co., Inc., St. Louis, Mo., USA) by xylan-degrading enzyme(s) under the following typical conditions: 1 ml reactions, 5 mg/ml substrate (total solids), 5 mg of xylanolytic protein/g of substrate, 50 mM sodium acetate pH 5, 50° C., 24 hours, sugar analysis using p-hydroxybenzoic acid hydrazide (PHBAH) assay as described by Lever, 1972, A new reaction for colorimetric determination of carbohydrates, Anal. Biochem 47: 273-279.

[0082] Xylanase: The term “xylanase” means a 1,4-beta-D-xylan-xylohydrolase (E.C. 3.2.1.8) that catalyzes the endohydrolysis of 1,4-beta-D-xylosidic linkages in xylans. For purposes of the present invention, xylanase activity is determined with 0.2% AZCL-arabinoxylan as substrate in 0.01% TRITON® X-100 and 200 mM sodium phosphate buffer pH 6 at 37° C. One unit of xylanase activity is defined as 1.0 mmole of azurine produced per minute at 37° C., pH 6 from 0.2% AZCL-arabinoxylan as substrate in 200 mM sodium phosphate pH 6 buffer.

### DETAILED DESCRIPTION OF THE INVENTION

[0083] The present invention relates to methods for degrading or converting a cellulosic material, comprising: treating the cellulosic material with an enzyme composition in the presence of a chitin binding protein. In one aspect, the methods further comprise recovering the degraded or converted cellulosic material. In another aspect, the cellulosic material is treated with an enzyme composition in the presence of a chitin binding protein and a GH61 polypeptide having cellulolytic enhancing activity.

[0084] The present invention also relates to methods for producing a fermentation product, comprising: (a) saccharifying a cellulosic material with an enzyme composition in the presence of a chitin binding protein; (b) fermenting the saccharified cellulosic material with one or more (e.g., several) fermenting microorganisms to produce the fermentation product; and (c) recovering the fermentation product from the fermentation. In one aspect, the cellulosic material is saccharified with an enzyme composition in the presence of a chitin binding protein and a GH61 polypeptide having cellulolytic enhancing activity.

[0085] The present invention also relates to methods of fermenting a cellulosic material, comprising: fermenting the cellulosic material with one or more (e.g., several) fermenting microorganisms, wherein the cellulosic material is saccharified with an enzyme composition in the presence of a chitin binding protein. In one aspect, the cellulosic material is saccharified with an enzyme composition in the presence of a chitin binding protein and a GH61 polypeptide having cellulolytic enhancing activity.

[0086] The methods of the present invention can be used to saccharify a cellulosic material to fermentable sugars and to convert the fermentable sugars to many useful fermentation products, e.g., fuel, potable ethanol, and/or platform chemicals (e.g., acids, alcohols, ketones, gases, and the like).

### Chitin Binding Proteins

[0087] In an embodiment, the isolated chitin binding proteins have a sequence identity to the full-length or mature chitin binding protein of SEQ ID NO: 2, SEQ ID NO: 4, SEQ ID NO: 6, SEQ ID NO: 8, SEQ ID NO: 10, SEQ ID NO: 12, SEQ ID NO: 14, SEQ ID NO: 16, SEQ ID NO: 18, SEQ ID NO: 20, SEQ ID NO: 22, SEQ ID NO: 24, SEQ ID NO: 26, SEQ ID NO: 28, SEQ ID NO: 30, SEQ ID NO: 32, SEQ ID NO: 34, SEQ ID NO: 36, SEQ ID NO: 38, SEQ ID NO: 40, SEQ ID NO: 42, SEQ ID NO: 44, SEQ ID NO: 46, SEQ ID NO: 48, SEQ ID NO: 50, SEQ ID NO: 52, SEQ ID NO: 54, SEQ ID NO: 56, SEQ ID NO: 58, SEQ ID NO: 60, SEQ ID NO: 62, SEQ ID NO: 64, SEQ ID NO: 66, SEQ ID NO: 68, SEQ ID NO: 70, SEQ ID NO: 72, SEQ ID NO: 74, SEQ ID NO: 76, SEQ ID NO: 78, SEQ ID NO: 80, SEQ ID NO: 82, SEQ ID NO: 84, SEQ ID NO: 86, SEQ ID NO: 88, SEQ ID NO: 90, SEQ ID NO: 92, SEQ ID NO: 94, SEQ ID NO: 96, SEQ ID NO: 98, SEQ ID NO: 100, SEQ ID NO: 102, SEQ ID NO: 104, SEQ ID NO: 106, SEQ ID NO: 108, SEQ ID NO: 110, SEQ ID NO: 112, SEQ ID NO: 114, SEQ ID NO: 116, SEQ ID NO: 118, SEQ ID NO: 120, SEQ ID NO: 122, SEQ ID NO: 124, SEQ ID NO: 126, SEQ ID NO: 128, SEQ ID NO: 130, SEQ ID NO: 132, SEQ ID NO: 134, SEQ ID NO: 136, SEQ ID NO: 138, SEQ ID NO: 140, SEQ ID NO: 142, SEQ ID NO: 144, SEQ ID NO: 146, SEQ ID NO: 148, SEQ ID NO: 150, SEQ ID NO: 152, SEQ ID NO: 154, SEQ ID NO: 156, SEQ ID NO: 158, SEQ ID NO: 160, SEQ ID NO: 162, SEQ ID NO: 164, SEQ ID NO: 166, SEQ ID NO: 168, SEQ ID NO: 170, SEQ ID NO: 172, SEQ ID NO: 174, SEQ ID NO: 176, SEQ ID NO: 178, or SEQ ID NO: 180, or the CBM33 thereof, of at least 60%, e.g., at least 65%, at least 70%, at least 75%, at least 80%, at least 81%, at least 82%, at least 83%, at least 84%, at least 85%, at least 86%, at least 87%, at least 88%, at least 89%, at least 90%, at least 91%, at least 92%, at least 93%, at least 94%, at least 95%, at least 96%, at least 97%, at least 98%, at least 99%, or 100%, which have chitin binding activity. In one aspect, the chitin binding proteins differ by up to 10 amino acids, e.g., 1, 2, 3, 4, 5, 6, 7, 8, 9, or 10, from the full-length or mature chitin binding protein of SEQ ID NO: 2, SEQ ID NO: 4, SEQ ID NO: 6, SEQ ID NO: 8, SEQ ID NO: 10, SEQ ID NO: 12, SEQ ID NO: 14, SEQ ID NO: 16, SEQ ID NO: 18, SEQ ID NO: 20, SEQ ID NO: 22, SEQ ID NO: 24, SEQ ID NO: 26, SEQ ID NO: 28, SEQ ID NO: 30, SEQ ID NO: 32, SEQ ID NO: 34, SEQ ID NO: 36, SEQ ID NO: 38, SEQ ID NO: 40, SEQ ID NO: 42, SEQ ID NO: 44, SEQ ID NO: 46, SEQ ID NO: 48, SEQ ID NO: 50, SEQ ID NO: 52, SEQ ID NO: 54, SEQ ID NO: 56, SEQ ID NO: 58, SEQ ID NO: 60, SEQ ID NO: 62, SEQ ID NO: 64, SEQ ID NO: 66, SEQ ID NO: 68, SEQ ID NO: 70, SEQ ID NO: 72, SEQ ID NO: 74, SEQ ID NO: 76, SEQ ID NO: 78, SEQ ID NO: 80, SEQ ID NO: 82, SEQ ID NO: 84, SEQ ID NO: 86, SEQ ID NO: 88, SEQ ID NO: 90, SEQ ID NO: 92, SEQ ID NO: 94, SEQ ID NO: 96, SEQ ID NO: 98, SEQ ID NO: 100, SEQ ID NO: 102, SEQ ID NO: 104, SEQ ID NO: 106, SEQ ID NO: 108, SEQ ID NO: 110, SEQ ID NO: 112, SEQ ID NO: 114, SEQ ID NO: 116, SEQ ID NO: 118, SEQ ID NO: 120, SEQ ID NO: 122, SEQ ID NO: 124, SEQ ID NO: 126, SEQ ID NO: 128, SEQ ID NO: 130, SEQ ID NO: 132, SEQ ID NO: 134, SEQ ID NO: 136, SEQ ID NO: 138, SEQ ID NO: 140, SEQ ID NO: 142, SEQ ID NO: 144, SEQ ID NO: 146, SEQ ID NO: 148, SEQ ID NO: 150, SEQ ID NO: 152, SEQ ID NO: 154, SEQ ID NO: 156, SEQ ID NO: 158, SEQ ID NO: 160, SEQ ID NO: 162, SEQ ID NO: 164, SEQ ID NO: 166, SEQ ID NO: 168, SEQ ID NO: 170, SEQ ID NO: 172, SEQ ID NO: 174, SEQ ID NO: 176, SEQ ID NO: 178, or SEQ ID NO: 180; or the CBM33 thereof.

[0088] A chitin binding protein in the methods of the present invention preferably comprises or consists of the amino acid sequence of SEQ ID NO: 2, SEQ ID NO: 4, SEQ ID NO: 6, SEQ ID NO: 8, SEQ ID NO: 10, SEQ ID NO: 12, SEQ ID NO: 14, SEQ ID NO: 16, SEQ ID NO: 18, SEQ ID NO: 20, SEQ ID NO: 22, SEQ ID NO: 24, SEQ ID NO: 26, SEQ ID NO: 28, SEQ ID NO: 30, SEQ ID NO: 32, SEQ ID NO: 34, SEQ ID NO: 36, SEQ ID NO: 38, SEQ ID NO: 40, SEQ ID NO: 42, SEQ ID NO: 44, SEQ ID NO: 46, SEQ ID NO: 48, SEQ ID NO: 50, SEQ ID NO: 52, SEQ ID NO: 54, SEQ ID NO: 56, SEQ ID NO: 58, SEQ ID NO: 60, SEQ ID NO: 62, SEQ ID NO: 64, SEQ ID NO: 66, SEQ ID NO: 68, SEQ ID NO: 70, SEQ ID NO: 72, SEQ ID NO: 74, SEQ ID NO: 76, SEQ ID NO: 78, SEQ ID NO: 80, SEQ ID NO: 82, SEQ ID NO: 84, SEQ ID NO: 86, SEQ ID NO: 88, SEQ ID NO: 90, SEQ ID NO: 92, SEQ ID NO: 94, SEQ ID NO: 96, SEQ ID NO: 98, SEQ ID NO: 100, SEQ ID NO: 102, SEQ ID NO: 104, SEQ ID NO: 106, SEQ ID NO: 108, SEQ ID NO: 110, SEQ ID NO: 112, SEQ ID NO: 114, SEQ ID NO: 116, SEQ ID NO: 118, SEQ ID NO: 120, SEQ ID NO: 122, SEQ ID NO: 124, SEQ ID NO: 126, SEQ ID NO: 128, SEQ ID NO: 130, SEQ ID NO: 132, SEQ ID NO: 134, SEQ ID NO: 136, SEQ ID NO: 138, SEQ ID NO: 140, SEQ ID NO: 142, SEQ ID NO: 144, SEQ ID NO: 146, SEQ ID NO: 148, SEQ ID NO: 150, SEQ ID NO: 152, SEQ ID NO: 154, SEQ ID NO: 156, SEQ ID NO: 158, SEQ ID NO: 160, SEQ ID NO: 162, SEQ ID NO: 164, SEQ ID NO: 166, SEQ ID NO: 168, SEQ ID NO: 170, SEQ ID NO: 172, SEQ ID NO: 174, SEQ ID NO: 176, SEQ ID NO: 178, or SEQ ID NO: 180; or the CBM33 thereof; or an allelic variant thereof; or is a fragment thereof retaining chitin binding activity.

[0089] In another aspect, the chitin binding protein comprises or consists of the mature chitin binding protein of SEQ ID NO: 2, SEQ ID NO: 4, SEQ ID NO: 6, SEQ ID NO: 8, SEQ ID NO: 10, SEQ ID NO: 12, SEQ ID NO: 14, SEQ ID NO: 16, SEQ ID NO: 18, SEQ ID NO: 20, SEQ ID NO: 22, SEQ ID NO: 24, SEQ ID NO: 26, SEQ ID NO: 28, SEQ ID NO: 30, SEQ ID NO: 32, SEQ ID NO: 34, SEQ ID NO: 36, SEQ ID NO: 38, SEQ ID NO: 40, SEQ ID NO: 42, SEQ ID NO: 44, SEQ ID NO: 46, SEQ ID NO: 48, SEQ ID NO: 50, SEQ ID NO: 52, SEQ ID NO: 54, SEQ ID NO: 56, SEQ ID NO: 58, SEQ ID NO: 60, SEQ ID NO: 62, SEQ ID NO: 64, SEQ ID NO: 66, SEQ ID NO: 68, SEQ ID NO: 70, SEQ ID NO: 72, SEQ ID NO: 74, SEQ ID NO: 76, SEQ ID NO: 78, SEQ ID NO: 80, SEQ ID NO: 82, SEQ ID NO: 84, SEQ ID NO: 86, SEQ ID NO: 88, SEQ ID NO: 90, SEQ ID NO: 92, SEQ ID NO: 94, SEQ ID NO: 96, SEQ ID NO: 98, SEQ ID NO: 100, SEQ ID NO: 102, SEQ ID NO: 104, SEQ ID NO: 106, SEQ ID NO: 108, SEQ ID NO: 110, SEQ ID NO: 112, SEQ ID NO: 114, SEQ ID NO: 116, SEQ ID NO: 118, SEQ ID NO: 120, SEQ ID NO: 122, SEQ ID NO: 124, SEQ ID NO: 126, SEQ ID NO: 128, SEQ ID NO: 130, SEQ ID NO: 132, SEQ ID NO: 134, SEQ ID NO: 136, SEQ ID NO: 138, SEQ ID NO: 140, SEQ ID NO: 142, SEQ ID NO: 144, SEQ ID NO: 146, SEQ ID NO: 148, SEQ ID NO: 150, SEQ ID NO: 152, SEQ ID NO: 154, SEQ ID NO: 156, SEQ ID NO: 158, SEQ ID NO: 160, SEQ ID NO: 162, SEQ ID NO: 164, SEQ ID NO: 166, SEQ ID NO: 168, SEQ ID NO: 170, SEQ ID NO: 172, SEQ ID NO: 174, SEQ ID NO: 176, SEQ ID NO: 178, or SEQ ID NO: 180; or the CBM33 thereof.

[0090] In another aspect, the chitin binding protein comprises or consists of amino acids 19 to 344 of SEQ ID NO: 2, amino acids 32 to 203 of SEQ ID NO: 4, amino acids 32 to 226 of SEQ ID NO: 6, amino acids 32 to 203 of SEQ ID NO: 8, amino acids 41 to 456 of SEQ ID NO: 10, amino acids 41 to 456 of SEQ ID NO: 12, amino acids 41 to 456 of SEQ ID NO: 14, amino acids 41 to 456 of SEQ ID NO: 16, amino acids 41 to 455 of SEQ ID NO: 18, amino acids 41 to 456 of SEQ ID NO: 20, amino acids 41 to 456 of SEQ ID NO: 22, amino acids 41 to 455 of SEQ ID NO: 24, amino acids 41 to 455 of SEQ ID NO: 26, amino acids 51 to 467 of SEQ ID NO: 28, amino acids 41 to 456 of SEQ ID NO: 30, amino acids 41 to 455 of SEQ ID NO: 32, amino acids 43 to 457 of SEQ ID NO: 34, amino acids 43 to 457 of SEQ ID NO: 36, amino acids 41 to 456 of SEQ ID NO: 38, amino acids 41 to 455 of SEQ ID NO: 40, amino acids 41 to 455 of SEQ ID NO: 42, amino acids 41 to 455 of SEQ ID NO: 44, amino acids 41 to 455 of SEQ ID NO: 46, amino acids 43 to 457 of SEQ ID NO: 48, amino acids 41 to 455 of SEQ ID NO: 50, amino acids 41 to 455 of SEQ ID NO: 52, amino acids 41 to 455 of SEQ ID NO: 54, amino acids 41 to 455 of SEQ ID NO: 56, amino acids 41 to 455 of SEQ ID NO: 58, amino acids 41 to 455 of SEQ ID NO: 60, amino acids 41 to 455 of SEQ ID NO: 62, amino acids 41 to 418 of SEQ ID NO: 64, amino acids 46 to 463 of SEQ ID NO: 66, amino acids 33 to 450 of SEQ ID NO: 68, amino acids 41 to 458 of SEQ ID NO: 70, amino acids 41 to 455 of SEQ ID NO: 72, amino acids 41 to 455 of SEQ ID NO: 74, amino acids 41 to 455 of SEQ ID NO: 76, amino acids 41 to 456 of SEQ ID NO: 78, amino acids 41 to 455 of SEQ ID NO: 80, amino acids 41 to 455 of SEQ ID NO: 82, amino acids 41 to 455 of SEQ ID NO: 84, amino acids 41 to 455 of SEQ ID NO: 86, amino acids 41 to 455 of SEQ ID NO: 88, amino acids 41 to 455 of SEQ ID NO: 90, amino acids 41 to 458 of SEQ ID NO: 92, amino acids 41 to 455 of SEQ ID NO: 94, amino acids 33 to 450 of SEQ ID NO: 96, amino acids 33 to 450 of SEQ ID NO: 98, amino acids 43 to 232 of SEQ ID NO: 100, amino acids 41 to 458 of SEQ ID NO: 102, amino acids 41 to 455 of SEQ ID NO: 104, amino acids 41 to 458 of SEQ ID NO: 106, amino acids 33 to 450 of SEQ ID NO: 108, amino acids 41 to 455 of SEQ ID NO: 110, amino acids 41 to 458 of SEQ ID NO: 112, amino acids 41 to 455 of SEQ ID NO: 114, amino acids 41 to 455 of SEQ ID NO: 116, amino acids 41 to 455 of SEQ ID NO: 118, amino acids 41 to 455 of SEQ ID NO: 120, amino acids 41 to 455 of SEQ ID NO: 122, amino acids 41 to 458 of SEQ ID NO: 124, amino acids 41 to 458 of SEQ ID NO: 126, amino acids 41 to 458 of SEQ ID NO: 128, amino acids 41 to 455 of SEQ ID NO: 130, amino acids 41 to 455 of SEQ ID NO: 132, amino acids 33 to 450 of SEQ ID NO: 134, amino acids 33 to 450 of SEQ ID NO: 136, amino acids 33 to 450 of SEQ ID NO: 138, amino acids 41 to 458 of SEQ ID NO: 140, amino acids 41 to 459 of SEQ ID NO: 142, amino acids 41 to 458 of SEQ ID NO: 144, amino acids 41 to 458 of SEQ ID NO: 146, amino acids 41 to 455 of SEQ ID NO: 148, amino acids 30 to 444 of SEQ ID NO: 150, amino acids 30 to 444 of SEQ ID NO: 152, amino acids 30 to 444 of SEQ ID NO: 154, amino acids 41 to 455 of SEQ ID NO: 156, amino acids 41 to 455 of SEQ ID NO: 158, amino acids 41 to 458 of SEQ ID NO: 160, amino acids 41 to 455 of SEQ ID NO: 162, amino acids 41 to 458 of SEQ ID NO: 164, amino acids 41 to 455 of SEQ ID NO: 166, amino acids 35 to 452 of SEQ ID NO: 168, amino acids 39 to 457 of SEQ ID NO: 170, amino acids 35 to 427 of SEQ ID NO: 172, amino acids 37 to 220 of SEQ ID NO: 174, amino acids 41 to 185 of SEQ ID NO: 176, amino acids 1 to 387 of SEQ ID NO: 178, or amino acids 1 to 387 of SEQ ID NO: 180; or the CBM33 thereof.

[0091] In another embodiment, the isolated chitin binding proteins are encoded by polynucleotides that hybridize under very low stringency conditions, low stringency conditions, medium stringency conditions, medium-high stringency conditions, high stringency conditions, or very high stringency conditions with the full-length or mature chitin binding protein coding sequence of SEQ ID NO: 1, SEQ ID NO: 3, SEQ ID NO: 5, SEQ ID NO: 7, SEQ ID NO: 9, SEQ ID NO: 11, SEQ ID NO: 13, SEQ ID NO: 15, SEQ ID NO: 17, SEQ ID NO: 19, SEQ ID NO: 21, SEQ ID NO: 23, SEQ ID NO: 25, SEQ ID NO: 27, SEQ ID NO: 29, SEQ ID NO: 31, SEQ ID NO: 33, SEQ ID NO: 35, SEQ ID NO: 37, SEQ ID NO: 39, SEQ ID NO: 41, SEQ ID NO: 43, SEQ ID NO: 45, SEQ ID NO: 47, SEQ ID NO: 49, SEQ ID NO: 51, SEQ ID NO: 53, SEQ ID NO: 55, SEQ ID NO: 57, SEQ ID NO: 59, SEQ ID NO: 61, SEQ ID NO: 63, SEQ ID NO: 65, SEQ ID NO: 67, SEQ ID NO: 69, SEQ ID NO: 71, SEQ ID NO: 73, SEQ ID NO: 75, SEQ ID NO: 77, SEQ ID NO: 79, SEQ ID NO: 81, SEQ ID NO: 83, SEQ ID NO: 85, SEQ ID NO: 87, SEQ ID NO: 89, SEQ ID NO: 91, SEQ ID NO: 93, SEQ ID NO: 95, SEQ ID NO: 97, SEQ ID NO: 99, SEQ ID NO: 101, SEQ ID NO: 103, SEQ ID NO: 105, SEQ ID NO: 107, SEQ ID NO: 109, SEQ ID NO: 111, SEQ ID NO: 113, SEQ ID NO: 115, SEQ ID NO: 117, SEQ ID NO: 119, SEQ ID NO: 121, SEQ ID NO: 123, SEQ ID NO: 125, SEQ ID NO: 127, SEQ ID NO: 129, SEQ ID NO: 131, SEQ ID NO: 133, SEQ ID NO: 135, SEQ ID NO: 137, SEQ ID NO: 139, SEQ ID NO: 141, SEQ ID NO: 143, SEQ ID NO: 145, SEQ ID NO: 147, SEQ ID NO: 149, SEQ ID NO: 151, SEQ ID NO: 153, SEQ ID NO: 155, SEQ ID NO: 157, SEQ ID NO: 159, SEQ ID NO: 161, SEQ ID NO: 163, SEQ ID NO: 165, SEQ ID NO: 167, SEQ ID NO: 169, SEQ ID NO: 171, SEQ ID NO: 173, SEQ ID NO: 175, SEQ ID NO: 177, or SEQ ID NO: 179; the CBM33 coding sequence thereof; or the full-length complement thereof (Sambrook et al., 1989, Molecular Cloning, A Laboratory Manual, 2d edition, Cold Spring Harbor, N.Y.).

[0092] The polynucleotide of SEQ ID NO: 1, SEQ ID NO: 3, SEQ ID NO: 5, SEQ ID NO: 7, SEQ ID NO: 9, SEQ ID NO: 11, SEQ ID NO: 13, SEQ ID NO: 15, SEQ ID NO: 17, SEQ ID NO: 19, SEQ ID NO: 21, SEQ ID NO: 23, SEQ ID NO: 25, SEQ ID NO: 27, SEQ ID NO: 29, SEQ ID NO: 31, SEQ ID NO: 33, SEQ ID NO: 35, SEQ ID NO: 37, SEQ ID NO: 39, SEQ ID NO: 41, SEQ ID NO: 43, SEQ ID NO: 45, SEQ ID NO: 47, SEQ ID NO: 49, SEQ ID NO: 51, SEQ ID NO: 53, SEQ ID NO: 55, SEQ ID NO: 57, SEQ ID NO: 59, SEQ ID NO: 61, SEQ ID NO: 63, SEQ ID NO: 65, SEQ ID NO: 67, SEQ ID NO: 69, SEQ ID NO: 71, SEQ ID NO: 73, SEQ ID NO: 75, SEQ ID NO: 77, SEQ ID NO: 79, SEQ ID NO: 81, SEQ ID NO: 83, SEQ ID NO: 85, SEQ ID NO: 87, SEQ ID NO: 89, SEQ ID NO: 91, SEQ ID NO: 93, SEQ ID NO: 95, SEQ ID NO: 97, SEQ ID NO: 99, SEQ ID NO: 101, SEQ ID NO: 103, SEQ ID NO: 105, SEQ ID NO: 107, SEQ ID NO: 109, SEQ ID NO: 111, SEQ ID NO: 113, SEQ ID NO: 115, SEQ ID NO: 117, SEQ ID NO: 119, SEQ ID NO: 121, SEQ ID NO: 123, SEQ ID NO: 125, SEQ ID NO: 127, SEQ ID NO: 129, SEQ ID NO: 131, SEQ ID NO: 133, SEQ ID NO: 135, SEQ ID NO: 137, SEQ ID NO: 139, SEQ ID NO: 141, SEQ ID NO: 143, SEQ ID NO: 145, SEQ ID NO: 147, SEQ ID NO: 149, SEQ ID NO: 151, SEQ ID NO: 153, SEQ ID NO: 155, SEQ ID NO: 157, SEQ ID NO: 159, SEQ ID NO: 161, SEQ ID NO: 163, SEQ ID NO: 165, SEQ ID NO: 167, SEQ ID NO: 169, SEQ ID NO: 171, SEQ ID NO: 173, SEQ ID NO: 175, SEQ ID NO: 177, or SEQ ID NO: 179, the mature polypeptide coding sequence thereof, the CBM33 coding sequence thereof, or a subsequence thereof, as well as the chitin binding protein of SEQ ID NO: 2, SEQ ID NO: 4, SEQ ID NO: 6, SEQ ID NO: 8, SEQ ID NO: 10, SEQ ID NO: 12, SEQ ID NO: 14, SEQ ID NO: 16, SEQ ID NO: 18, SEQ ID NO: 20, SEQ ID NO: 22, SEQ ID NO: 24, SEQ ID NO: 26, SEQ ID NO: 28, SEQ ID NO: 30, SEQ ID NO: 32, SEQ ID NO: 34, SEQ ID NO: 36, SEQ ID NO: 38, SEQ ID NO: 40, SEQ ID NO: 42, SEQ ID NO: 44, SEQ ID NO: 46, SEQ ID NO: 48, SEQ ID NO: 50, SEQ ID NO: 52, SEQ ID NO: 54, SEQ ID NO: 56, SEQ ID NO: 58, SEQ ID NO: 60, SEQ ID NO: 62, SEQ ID NO: 64, SEQ ID NO: 66, SEQ ID NO: 68, SEQ ID NO: 70, SEQ ID NO: 72, SEQ ID NO: 74, SEQ ID NO: 76, SEQ ID NO: 78, SEQ ID NO: 80, SEQ ID NO: 82, SEQ ID NO: 84, SEQ ID NO: 86, SEQ ID NO: 88, SEQ ID NO: 90, SEQ ID NO: 92, SEQ ID NO: 94, SEQ ID NO: 96, SEQ ID NO: 98, SEQ ID NO: 100, SEQ ID NO: 102, SEQ ID NO: 104, SEQ ID NO: 106, SEQ ID NO: 108, SEQ ID NO: 110, SEQ ID NO: 112, SEQ ID NO: 114, SEQ ID NO: 116, SEQ ID NO: 118, SEQ ID NO: 120, SEQ ID NO: 122, SEQ ID NO: 124, SEQ ID NO: 126, SEQ ID NO: 128, SEQ ID NO: 130, SEQ ID NO: 132, SEQ ID NO: 134, SEQ ID NO: 136, SEQ ID NO: 138, SEQ ID NO: 140, SEQ ID NO: 142, SEQ ID NO: 144, SEQ ID NO: 146, SEQ ID NO: 148, SEQ ID NO: 150, SEQ ID NO: 152, SEQ ID NO: 154, SEQ ID NO: 156, SEQ ID NO: 158, SEQ ID NO: 160, SEQ ID NO: 162, SEQ ID NO: 164, SEQ ID NO: 166, SEQ ID NO: 168, SEQ ID NO: 170, SEQ ID NO: 172, SEQ ID NO: 174, SEQ ID NO: 176, SEQ ID NO: 178, or SEQ ID NO: 180, the mature polypeptide thereof, the CBM33 thereof, or a fragment thereof, may be used to design nucleic acid probes to identify and clone DNA encoding chitin binding proteins from strains of different genera or species according to methods well known in the art. In particular, such probes can be used for hybridization with the genomic DNA or cDNA of a cell of interest, following standard Southern blotting procedures, in order to identify and isolate the corresponding gene therein. Such probes can be considerably shorter than the entire sequence, but should be at least 15, e.g., at least 25, at least 35, or at least 70 nucleotides in length. Preferably, the nucleic acid probe is at least 100 nucleotides in length, e.g., at least 200 nucleotides, at least 300 nucleotides, at least 400 nucleotides, at least 500 nucleotides, at least 600 nucleotides, at least 700 nucleotides, at least 800 nucleotides, or at least 900 nucleotides in length. Both DNA and RNA probes can be used. The probes are typically labeled for detecting the corresponding gene (for example, with ³²P, ³H, ³⁵S, biotin, or avidin). Such probes are encompassed by the present invention.

[0093] A genomic DNA or cDNA library prepared from such other strains may be screened for DNA that hybridizes with the probes described above and encodes a chitin binding protein. Genomic or other DNA from such other strains may be separated by agarose or polyacrylamide gel electrophoresis, or other separation techniques. DNA from the libraries or the separated DNA may be transferred to and immobilized on nitrocellulose or other suitable carrier material. In order to identify a clone or DNA that is homologous with SEQ ID NO: 1, SEQ ID NO: 3, SEQ ID NO: 5, SEQ ID NO: 7, SEQ ID NO: 9, SEQ ID NO: 11, SEQ ID NO: 13, SEQ ID NO: 15, SEQ ID NO: 17, SEQ ID NO: 19, SEQ ID NO: 21, SEQ ID NO: 23, SEQ ID NO: 25, SEQ ID NO: 27, SEQ ID NO: 29, SEQ ID NO: 31, SEQ ID NO: 33, SEQ ID NO: 35, SEQ ID NO: 37, SEQ ID NO: 39, SEQ ID NO: 41, SEQ ID NO: 43, SEQ ID NO: 45, SEQ ID NO: 47, SEQ ID NO: 49, SEQ ID NO: 51, SEQ ID NO: 53, SEQ ID NO: 55, SEQ ID NO: 57, SEQ ID NO: 59, SEQ ID NO: 61, SEQ ID NO: 63, SEQ ID NO: 65, SEQ ID NO: 67, SEQ ID NO: 69, SEQ ID NO: 71, SEQ ID NO: 73, SEQ ID NO: 75, SEQ ID NO: 77, SEQ ID NO: 79, SEQ ID NO: 81, SEQ ID NO: 83, SEQ ID NO: 85, SEQ ID NO: 87, SEQ ID NO: 89, SEQ ID NO: 91, SEQ ID NO: 93, SEQ ID NO: 95, SEQ ID NO: 97, SEQ ID NO: 99, SEQ ID NO: 101, SEQ ID NO: 103, SEQ ID NO: 105, SEQ ID NO: 107, SEQ ID NO: 109, SEQ ID NO: 111, SEQ ID NO: 113, SEQ ID NO: 115, SEQ ID NO: 117, SEQ ID NO: 119, SEQ ID NO: 121, SEQ ID NO: 123, SEQ ID NO: 125, SEQ ID NO: 127, SEQ ID NO: 129, SEQ ID NO: 131, SEQ ID NO: 133, SEQ ID NO: 135, SEQ ID NO: 137, SEQ ID NO: 139, SEQ ID NO: 141, SEQ ID NO: 143, SEQ ID NO: 145, SEQ ID NO: 147, SEQ ID NO: 149, SEQ ID NO: 151, SEQ ID NO: 153, SEQ ID NO: 155, SEQ ID NO: 157, SEQ ID NO: 159, SEQ ID NO: 161, SEQ ID NO: 163, SEQ ID NO: 165, SEQ ID NO: 167, SEQ ID NO: 169, SEQ ID NO: 171, SEQ ID NO: 173, SEQ ID NO: 175, SEQ ID NO: 177, or SEQ ID NO: 179; the mature chitin binding protein coding sequence thereof; the CBM33 thereof; or a subsequence thereof; the carrier material is preferably used in a Southern blot.

[0094] For purposes of the present invention, hybridization indicates that the polynucleotide hybridizes to a labeled nucleic acid probe corresponding to SEQ ID NO: 1, SEQ ID NO: 3, SEQ ID NO: 5, SEQ ID NO: 7, SEQ ID NO: 9, SEQ ID NO: 11, SEQ ID NO: 13, SEQ ID NO: 15, SEQ ID NO: 17, SEQ ID NO: 19, SEQ ID NO: 21, SEQ ID NO: 23, SEQ ID NO: 25, SEQ ID NO: 27, SEQ ID NO: 29, SEQ ID NO: 31, SEQ ID NO: 33, SEQ ID NO: 35, SEQ ID NO: 37, SEQ ID NO: 39, SEQ ID NO: 41, SEQ ID NO: 43, SEQ ID NO: 45, SEQ ID NO: 47, SEQ ID NO: 49, SEQ ID NO: 51, SEQ ID NO: 53, SEQ ID NO: 55, SEQ ID NO: 57, SEQ ID NO: 59, SEQ ID NO: 61, SEQ ID NO: 63, SEQ ID NO: 65, SEQ ID NO: 67, SEQ ID NO: 69, SEQ ID NO: 71, SEQ ID NO: 73, SEQ ID NO: 75, SEQ ID NO: 77, SEQ ID NO: 79, SEQ ID NO: 81, SEQ ID NO: 83, SEQ ID NO: 85, SEQ ID NO: 87, SEQ ID NO: 89, SEQ ID NO: 91, SEQ ID NO: 93, SEQ ID NO: 95, SEQ ID NO: 97, SEQ ID NO: 99, SEQ ID NO: 101, SEQ ID NO: 103, SEQ ID NO: 105, SEQ ID NO: 107, SEQ ID NO: 109, SEQ ID NO: 111, SEQ ID NO: 113, SEQ ID NO: 115, SEQ ID NO: 117, SEQ ID NO: 119, SEQ ID NO: 121, SEQ ID NO: 123, SEQ ID NO: 125, SEQ ID NO: 127, SEQ ID NO: 129, SEQ ID NO: 131, SEQ ID NO: 133, SEQ ID NO: 135, SEQ ID NO: 137, SEQ ID NO: 139, SEQ ID NO: 141, SEQ ID NO: 143, SEQ ID NO: 145, SEQ ID NO: 147, SEQ ID NO: 149, SEQ ID NO: 151, SEQ ID NO: 153, SEQ ID NO: 155, SEQ ID NO: 157, SEQ ID NO: 159, SEQ ID NO: 161, SEQ ID NO: 163, SEQ ID NO: 165, SEQ ID NO: 167, SEQ ID NO: 169, SEQ ID NO: 171, SEQ ID NO: 173, SEQ ID NO: 175, SEQ ID NO: 177, or SEQ ID NO: 179; the mature chitin binding protein coding sequence thereof; the CBM33 coding sequence thereof; a full-length complement thereof; or a subsequence thereof; under very low to very high stringency conditions. Molecules to which the nucleic acid probe hybridizes under these conditions can be detected using, for example, X-ray film or any other detection means known in the art.

[0095] In one aspect, the nucleic acid probe is a polynucleotide that encodes the chitin binding protein of SEQ ID NO: 2, SEQ ID NO: 4, SEQ ID NO: 6, SEQ ID NO: 8, SEQ ID NO: 10, SEQ ID NO: 12, SEQ ID NO: 14, SEQ ID NO: 16, SEQ ID NO: 18, SEQ ID NO: 20, SEQ ID NO: 22, SEQ ID NO: 24, SEQ ID NO: 26, SEQ ID NO: 28, SEQ ID NO: 30, SEQ ID NO: 32, SEQ ID NO: 34, SEQ ID NO: 36, SEQ ID NO: 38, SEQ ID NO: 40, SEQ ID NO: 42, SEQ ID NO: 44, SEQ ID NO: 46, SEQ ID NO: 48, SEQ ID NO: 50, SEQ ID NO: 52, SEQ ID NO: 54, SEQ ID NO: 56, SEQ ID NO: 58, SEQ ID NO: 60, SEQ ID NO: 62, SEQ ID NO: 64, SEQ ID NO: 66, SEQ ID NO: 68, SEQ ID NO: 70, SEQ ID NO: 72, SEQ ID NO: 74, SEQ ID NO: 76, SEQ ID NO: 78, SEQ ID NO: 80, SEQ ID NO: 82, SEQ ID NO: 84, SEQ ID NO: 86, SEQ ID NO: 88, SEQ ID NO: 90, SEQ ID NO: 92, SEQ ID NO: 94, SEQ ID NO: 96, SEQ ID NO: 98, SEQ ID NO: 100, SEQ ID NO: 102, SEQ ID NO: 104, SEQ ID NO: 106, SEQ ID NO: 108, SEQ ID NO: 110, SEQ ID NO: 112, SEQ ID NO: 114, SEQ ID NO: 116, SEQ ID NO: 118, SEQ ID NO: 120, SEQ ID NO: 122, SEQ ID NO: 124, SEQ ID NO: 126, SEQ ID NO: 128, SEQ ID NO: 130, SEQ ID NO: 132, SEQ ID NO: 134, SEQ ID NO: 136, SEQ ID NO: 138, SEQ ID NO: 140, SEQ ID NO: 142, SEQ ID NO: 144, SEQ ID NO: 146, SEQ ID NO: 148, SEQ ID NO: 150, SEQ ID NO: 152, SEQ ID NO: 154, SEQ ID NO: 156, SEQ ID NO: 158, SEQ ID NO: 160, SEQ ID NO: 162, SEQ ID NO: 164, SEQ ID NO: 166, SEQ ID NO: 168, SEQ ID NO: 170, SEQ ID NO: 172, SEQ ID NO: 174, SEQ ID NO: 176, SEQ ID NO: 178, or SEQ ID NO: 180; the mature chitin binding protein thereof; the CBM33 thereof; or a fragment thereof.

[0096] In another aspect, the nucleic acid probe is SEQ ID NO: 1, SEQ ID NO: 3, SEQ ID NO: 5, SEQ ID NO: 7, SEQ ID NO: 9, SEQ ID NO: 11, SEQ ID NO: 13, SEQ ID NO: 15, SEQ ID NO: 17, SEQ ID NO: 19, SEQ ID NO: 21, SEQ ID NO: 23, SEQ ID NO: 25, SEQ ID NO: 27, SEQ ID NO: 29, SEQ ID NO: 31, SEQ ID NO: 33, SEQ ID NO: 35, SEQ ID NO: 37, SEQ ID NO: 39, SEQ ID NO: 41, SEQ ID NO: 43, SEQ ID NO: 45, SEQ ID NO: 47, SEQ ID NO: 49, SEQ ID NO: 51, SEQ ID NO: 53, SEQ ID NO: 55, SEQ ID NO: 57, SEQ ID NO: 59, SEQ ID NO: 61, SEQ ID NO: 63, SEQ ID NO: 65, SEQ ID NO: 67, SEQ ID NO: 69, SEQ ID NO: 71, SEQ ID NO: 73, SEQ ID NO: 75, SEQ ID NO: 77, SEQ ID NO: 79, SEQ ID NO: 81, SEQ ID NO: 83, SEQ ID NO: 85, SEQ ID NO: 87, SEQ ID NO: 89, SEQ ID NO: 91, SEQ ID NO: 93, SEQ ID NO: 95, SEQ ID NO: 97, SEQ ID NO: 99, SEQ ID NO: 101, SEQ ID NO: 103, SEQ ID NO: 105, SEQ ID NO: 107, SEQ ID NO: 109, SEQ ID NO: 111, SEQ ID NO: 113, SEQ ID NO: 115, SEQ ID NO: 117, SEQ ID NO: 119, SEQ ID NO: 121, SEQ ID NO: 123, SEQ ID NO: 125, SEQ ID NO: 127, SEQ ID NO: 129, SEQ ID NO: 131, SEQ ID NO: 133, SEQ ID NO: 135, SEQ ID NO: 137, SEQ ID NO: 139, SEQ ID NO: 141, SEQ ID NO: 143, SEQ ID NO: 145, SEQ ID NO: 147, SEQ ID NO: 149, SEQ ID NO: 151, SEQ ID NO: 153, SEQ ID NO: 155, SEQ ID NO: 157, SEQ ID NO: 159, SEQ ID NO: 161, SEQ ID NO: 163, SEQ ID NO: 165, SEQ ID NO: 167, SEQ ID NO: 169, SEQ ID NO: 171, SEQ ID NO: 173, SEQ ID NO: 175, SEQ ID NO: 177, or SEQ ID NO: 179; the mature chitin binding protein coding sequence thereof; or the CBM33 coding sequence thereof.

[0097] In another embodiment, the isolated chitin binding proteins are encoded by polynucleotides having a sequence identity to the full-length or mature chitin binding protein coding sequence of SEQ ID NO: 1, SEQ ID NO: 3, SEQ ID NO: 5, SEQ ID NO: 7, SEQ ID NO: 9, SEQ ID NO: 11, SEQ ID NO: 13, SEQ ID NO: 15, SEQ ID NO: 17, SEQ ID NO: 19, SEQ ID NO: 21, SEQ ID NO: 23, SEQ ID NO: 25, SEQ ID NO: 27, SEQ ID NO: 29, SEQ ID NO: 31, SEQ ID NO: 33, SEQ ID NO: 35, SEQ ID NO: 37, SEQ ID NO: 39, SEQ ID NO: 41, SEQ ID NO: 43, SEQ ID NO: 45, SEQ ID NO: 47, SEQ ID NO: 49, SEQ ID NO: 51, SEQ ID NO: 53, SEQ ID NO: 55, SEQ ID NO: 57, SEQ ID NO: 59, SEQ ID NO: 61, SEQ ID NO: 63, SEQ ID NO: 65, SEQ ID NO: 67, SEQ ID NO: 69, SEQ ID NO: 71, SEQ ID NO: 73, SEQ ID NO: 75, SEQ ID NO: 77, SEQ ID NO: 79, SEQ ID NO: 81, SEQ ID NO: 83, SEQ ID NO: 85, SEQ ID NO: 87, SEQ ID NO: 89, SEQ ID NO: 91, SEQ ID NO: 93, SEQ ID NO: 95, SEQ ID NO: 97, SEQ ID NO: 99, SEQ ID NO: 101, SEQ ID NO: 103, SEQ ID NO: 105, SEQ ID NO: 107, SEQ ID NO: 109, SEQ ID NO: 111, SEQ ID NO: 113, SEQ ID NO: 115, SEQ ID NO: 117, SEQ ID NO: 119, SEQ ID NO: 121, SEQ ID NO: 123, SEQ ID NO: 125, SEQ ID NO: 127, SEQ ID NO: 129, SEQ ID NO: 131, SEQ ID NO: 133, SEQ ID NO: 135, SEQ ID NO: 137, SEQ ID NO: 139, SEQ ID NO: 141, SEQ ID NO: 143, SEQ ID NO: 145, SEQ ID NO: 147, SEQ ID NO: 149, SEQ ID NO: 151, SEQ ID NO: 153, SEQ ID NO: 155, SEQ ID NO: 157, SEQ ID NO: 159, SEQ ID NO: 161, SEQ ID NO: 163, SEQ ID NO: 165, SEQ ID NO: 167, SEQ ID NO: 169, SEQ ID NO: 171, SEQ ID NO: 173, SEQ ID NO: 175, SEQ ID NO: 177, or SEQ ID NO: 179, or the CBM33 coding sequence thereof, of at least 60%, e.g., at least 65%, at least 70%, at least 75%, at least 80%, at least 81%, at least 82%, at least 83%, at least 84%, at least 85%, at least 86%, at least 87%, at least 88%, at least 89%, at least 90%, at least 91%, at least 92%, at least 93%, at least 94%, at least 95%, at least 96%, at least 97%, at least 98%, at least 99%, or 100%.

[0098] In another embodiment, the isolated chitin binding proteins are variants of the mature chitin binding protein of SEQ ID NO: 2, SEQ ID NO: 4, SEQ ID NO: 6, SEQ ID NO: 8, SEQ ID NO: 10, SEQ ID NO: 12, SEQ ID NO: 14, SEQ ID NO: 16, SEQ ID NO: 18, SEQ ID NO: 20, SEQ ID NO: 22, SEQ ID NO: 24, SEQ ID NO: 26, SEQ ID NO: 28, SEQ ID NO: 30, SEQ ID NO: 32, SEQ ID NO: 34, SEQ ID NO: 36, SEQ ID NO: 38, SEQ ID NO: 40, SEQ ID NO: 42, SEQ ID NO: 44, SEQ ID NO: 46, SEQ ID NO: 48, SEQ ID NO: 50, SEQ ID NO: 52, SEQ ID NO: 54, SEQ ID NO: 56, SEQ ID NO: 58, SEQ ID NO: 60, SEQ ID NO: 62, SEQ ID NO: 64, SEQ ID NO: 66, SEQ ID NO: 68, SEQ ID NO: 70, SEQ ID NO: 72, SEQ ID NO: 74, SEQ ID NO: 76, SEQ ID NO: 78, SEQ ID NO: 80, SEQ ID NO: 82, SEQ ID NO: 84, SEQ ID NO: 86, SEQ ID NO: 88, SEQ ID NO: 90, SEQ ID NO: 92, SEQ ID NO: 94, SEQ ID NO: 96, SEQ ID NO: 98, SEQ ID NO: 100, SEQ ID NO: 102, SEQ ID NO: 104, SEQ ID NO: 106, SEQ ID NO: 108, SEQ ID NO: 110, SEQ ID NO: 112, SEQ ID NO: 114, SEQ ID NO: 116, SEQ ID NO: 118, SEQ ID NO: 120, SEQ ID NO: 122, SEQ ID NO: 124, SEQ ID NO: 126, SEQ ID NO: 128, SEQ ID NO: 130, SEQ ID NO: 132, SEQ ID NO: 134, SEQ ID NO: 136, SEQ ID NO: 138, SEQ ID NO: 140, SEQ ID NO: 142, SEQ ID NO: 144, SEQ ID NO: 146, SEQ ID NO: 148, SEQ ID NO: 150, SEQ ID NO: 152, SEQ ID NO: 154, SEQ ID NO: 156, SEQ ID NO: 158, SEQ ID NO: 160, SEQ ID NO: 162, SEQ ID NO: 164, SEQ ID NO: 166, SEQ ID NO: 168, SEQ ID NO: 170, SEQ ID NO: 172, SEQ ID NO: 174, SEQ ID NO: 176, SEQ ID NO: 178, or SEQ ID NO: 180, or the CBM33 thereof, comprising a substitution, deletion, and/or insertion at one or more (e.g., several) positions. Preferably, amino acid changes are of a minor nature, that is conservative amino acid substitutions or insertions that do not significantly affect the folding and/or activity of the protein; small deletions, typically of 1-30 amino acids; small amino- or carboxyl-terminal extensions, such as an amino-terminal methionine residue; a small linker peptide of up to 20-25 residues; or a small extension that facilitates purification by changing net charge or another function, such as a poly-histidine tract, an antigenic epitope or a binding domain.

[0099] Examples of conservative substitutions are within the groups of basic amino acids (arginine, lysine and histidine), acidic amino acids (glutamic acid and aspartic acid), polar amino acids (glutamine and asparagine), hydrophobic amino acids (leucine, isoleucine and valine), aromatic amino acids (phenylalanine, tryptophan and tyrosine), and small amino acids (glycine, alanine, serine, threonine and methionine). Amino acid substitutions that do not generally alter specific activity are known in the art and are described, for example, by H. Neurath and R. L. Hill, 1979, In, The Proteins, Academic Press, New York. Common substitutions are Ala/Ser, Val/Ile, Asp/Glu, Thr/Ser, Ala/Gly, Ala/Thr, Ser/Asn, Ala/Val, Ser/Gly, Tyr/Phe, Ala/Pro, Lys/Arg, Asp/Asn, Leu/Ile, Leu/Val, Ala/Glu, and Asp/Gly.

[0100] Alternatively, the amino acid changes are of such a nature that the physico-chemical properties of the polypeptides are altered. For example, amino acid changes may improve the thermal stability of the polypeptide, alter the substrate specificity, change the pH optimum, and the like.

[0101] Essential amino acids in a polypeptide can be identified according to procedures known in the art, such as site-directed mutagenesis or alanine-scanning mutagenesis (Cunningham and Wells, 1989, Science 244: 1081-1085). In the latter technique, single alanine mutations are introduced at every residue in the molecule, and the resultant mutant molecules are tested for activity to identify amino acid residues that are critical to the activity of the molecule. See also, Hilton et al., 1996, J. Biol. Chem. 271: 4699-4708. The active site of the enzyme or other biological interaction can also be determined by physical analysis of structure, as determined by such techniques as nuclear magnetic resonance, crystallography, electron diffraction, or photoaffinity labeling, in conjunction with mutation of putative contact site amino acids. See, for example, de Vos et al., 1992, Science 255: 306-312; Smith et al., 1992, J. Mol. Biol. 224: 899-904; Wlodaver et al., 1992, FEBS Lett. 309: 59-64. The identity of essential amino acids can also be inferred from an alignment with a related polypeptide.

[0102] Single or multiple amino acid substitutions, deletions, and/or insertions can be made and tested using known methods of mutagenesis, recombination, and/or shuffling, followed by a relevant screening procedure, such as those disclosed by Reidhaar-Olson and Sauer, 1988, Science 241: 53-57; Bowie and Sauer, 1989, Proc. Natl. Acad. Sci. USA 86: 2152-2156; WO 95/17413; or WO 95/22625. Other methods that can be used include error-prone PCR, phage display (e.g., Lowman et al., 1991, Biochemistry 30: 10832-10837; U.S. Pat. No. 5,223,409; WO 92/06204), and region-directed mutagenesis (Derbyshire et al., 1986, Gene 46: 145; Ner et al., 1988, DNA 7: 127).

[0103] Mutagenesis/shuffling methods can be combined with high-throughput, automated screening methods to detect activity of cloned, mutagenized polypeptides expressed by host cells (Ness et al., 1999, Nature Biotechnology 17: 893-896). Mutagenized DNA molecules that encode active polypeptides can be recovered from the host cells and rapidly sequenced using standard methods in the art. These methods allow the rapid determination of the importance of individual amino acid residues in a polypeptide.

[0104] In an embodiment, the number of amino acid substitutions, deletions, and/or insertions introduced into the mature chitin binding protein of SEQ ID NO: 2, SEQ ID NO: 4, SEQ ID NO: 6, SEQ ID NO: 8, SEQ ID NO: 10, SEQ ID NO: 12, SEQ ID NO: 14, SEQ ID NO: 16, SEQ ID NO: 18, SEQ ID NO: 20, SEQ ID NO: 22, SEQ ID NO: 24, SEQ ID NO: 26, SEQ ID NO: 28, SEQ ID NO: 30, SEQ ID NO: 32, SEQ ID NO: 34, SEQ ID NO: 36, SEQ ID NO: 38, SEQ ID NO: 40, SEQ ID NO: 42, SEQ ID NO: 44, SEQ ID NO: 46, SEQ ID NO: 48, SEQ ID NO: 50, SEQ ID NO: 52, SEQ ID NO: 54, SEQ ID NO: 56, SEQ ID NO: 58, SEQ ID NO: 60, SEQ ID NO: 62, SEQ ID NO: 64, SEQ ID NO: 66, SEQ ID NO: 68, SEQ ID NO: 70, SEQ ID NO: 72, SEQ ID NO: 74, SEQ ID NO: 76, SEQ ID NO: 78, SEQ ID NO: 80, SEQ ID NO: 82, SEQ ID NO: 84, SEQ ID NO: 86, SEQ ID NO: 88, SEQ ID NO: 90, SEQ ID NO: 92, SEQ ID NO: 94, SEQ ID NO: 96, SEQ ID NO: 98, SEQ ID NO: 100, SEQ ID NO: 102, SEQ ID NO: 104, SEQ ID NO: 106, SEQ ID NO: 108, SEQ ID NO: 110, SEQ ID NO: 112, SEQ ID NO: 114, SEQ ID NO: 116, SEQ ID NO: 118, SEQ ID NO: 120, SEQ ID NO: 122, SEQ ID NO: 124, SEQ ID NO: 126, SEQ ID NO: 128, SEQ ID NO: 130, SEQ ID NO: 132, SEQ ID NO: 134, SEQ ID NO: 136, SEQ ID NO: 138, SEQ ID NO: 140, SEQ ID NO: 142, SEQ ID NO: 144, SEQ ID NO: 146, SEQ ID NO: 148, SEQ ID NO: 150, SEQ ID NO: 152, SEQ ID NO: 154, SEQ ID NO: 156, SEQ ID NO: 158, SEQ ID NO: 160, SEQ ID NO: 162, SEQ ID NO: 164, SEQ ID NO: 166, SEQ ID NO: 168, SEQ ID NO: 170, SEQ ID NO: 172, SEQ ID NO: 174, SEQ ID NO: 176, SEQ ID NO: 178, or SEQ ID NO: 180, or the CBM33 thereof, is up to 10, e.g., 1, 2, 3, 4, 5, 6, 7, 8, 9, or 10.

[0105] The chitin binding protein may be a hybrid polypeptide in which a region of one polypeptide is fused at the N-terminus or the C-terminus of a region of another polypeptide.

[0106] The chitin binding protein may be a fusion polypeptide or cleavable fusion polypeptide in which another polypeptide is fused at the N-terminus or the C-terminus of a chitin binding protein. A fusion polypeptide is produced by fusing a polynucleotide encoding another polypeptide to a polynucleotide encoding a chitin binding protein. Techniques for producing fusion polypeptides are known in the art, and include ligating the coding sequences encoding the polypeptides so that they are in frame and that expression of the fusion polypeptide is under control of the same promoter(s) and terminator. Fusion polypeptides may also be constructed using intein technology in which fusion polypeptides are created post-translationally (Cooper et al., 1993, EMBO J. 12: 2575-2583; Dawson et al., 1994, Science 266: 776-779).

[0107] A fusion polypeptide can further comprise a cleavage site between the two polypeptides. Upon secretion of the fusion protein, the site is cleaved releasing the two polypeptides. Examples of cleavage sites include, but are not limited to, the sites disclosed in Martin et al., 2003, J. Ind. Microbiol. Biotechnol. 3: 568-576; Svetina et al., 2000, J. Biotechnol. 76: 245-251; Rasmussen-Wilson et al., 1997, Appl. Environ. Microbiol. 63: 3488-3493; Ward et al., 1995, Biotechnology 13: 498-503; and Contreras et al., 1991, Biotechnology 9: 378-381; Eaton et al., 1986, Biochemistry 25: 505-512; Collins-Racie et al., 1995, Biotechnology 13: 982-987; Carter et al., 1989, Proteins: Structure, Function, and Genetics 6: 240-248; and Stevens, 2003, Drug Discovery World 4: 35-48.

[0108] Additional examples of chitin binding proteins that may be used in the methods of the present invention are listed below with their accession numbers, which are incorporated herein by reference. It is understood herein that each of the chitin binding proteins below are included in each of the embodiments above.

[0109] Bacillus amyloliquefaciens ALKO 2718 (GENBANK AF181997, GENPEPT AAG09957.1)

[0110] Bacillus anthracis A2012 (GENBANK NC 003995, GENPEPT NP 656708.1)

[0111] Bacillus anthracis Ames (GENBANK AE017033, GENPEPT AAP26659.1, GENBANK NC 003997, GENPEPT NP 845173.1)

[0112] Bacillus anthracis Ames (GENBANK AE017032, GENPEPT AAP26628.1, GENBANK NC 003997, GENPEPT NP 845142.1)

[0113] Bacillus anthracis Ames 0581 (GENBANK AE017334, GENPEPT AAT31944.1)

[0114] Bacillus anthracis Ames 0581 (GENBANK AE017334, GENPEPT AAT31910.1)

[0115] Bacillus anthracis Sterne (GENBANK AE017225, GENPEPT AAT54946.1)

[0116] Bacillus anthracis Sterne (GENBANK AE017225, GENPEPT AAT54914.1)

[0117] Bacillus cereus ATCC 10987 (GENBANK AE017273, GENPEPT AAS41767.1, GENBANK NC 003909, GENPEPT NP 979159.1)

[0118] Bacillus cereus ATCC 10987 (GENBANK AE017273, GENPEPT AAS41736.1, GENBANK NC 003909, GENPEPT NP 979128.1)

[0119] Bacillus cereus ATCC 14579 (GENBANK AE017007, GENPEPT AAP09778.1, GENBANK NC 004722, GENPEPT NP 832577.1)

[0120] Bacillus cereus ATCC 14579 (GENBANK AE017007, GENPEPT AAP09751.1, GENBANK NC 004722, GENPEPT NP 832550.1)

[0121] Bacillus cereus E33L (GENBANK CP000040, GENPEPT AAY60428.1)

[0122] Bacillus cereus ZK (GENBANK CP000001, GENPEPT AAU17736.1)

[0123] Bacillus cereus ZK (GENBANK CP000001, GENPEPT AAU17707.1)

[0124] Bacillus clausii KSM-K16 (GENBANK AP006627, GENPEPT BAD63699.1)

[0125] Bacillus halodurans C-125 (GENBANK AP001511, GENPEPT BAB05022.1, GENBANK NC 002570, GENPEPT NP 242169.1)

[0126] Bacillus licheniformis DSM 13, ATCC 14580 (GENBANK CP000002, GENPEPT AAU22121.1, GENBANK AE017333, GENPEPT AAU39477.1)

[0127] Bacillus thuringiensis serovar konkukian 97-27 (GENBANK AE017355, GENPEPT AAT61310.1)

[0128] Bacillus thuringiensis serovar konkukian 97-27 (GENBANK AE017355, GENPEPT AAT61323.1)

### Sources of Chitin Binding Proteins

[0129] A chitin binding protein may be obtained from microorganisms of any genus. For purposes of the present invention, the term “obtained from” as used herein in connection with a given source shall mean that the chitin binding protein encoded by a polynucleotide is produced by the source or by a strain in which the polynucleotide from the source has been inserted. In one aspect, the chitin binding protein obtained from a given source is secreted extracellularly.

[0130] The chitin binding protein may be a bacterial chitin binding protein. For example, the chitin binding protein may be a Gram-positive bacterial polypeptide such as a Bacillus, Chromobacterium, Clostridium, Enterococcus, Geobacillus, Lactobacillus, Lactococcus, Listeria, Lysinibacillus, Oceanobacillus, Staphylococcus, Streptococcus, Streptomyces, or Thermobifida polypeptide, or a Gram-negative bacterial polypeptide such as a Campylobacter, E. coli, Flavobacterium, Fusobacterium, Helicobacter, Ilyobacter, Neisseria, Photobacterium, Proteus, Pseudomonas, Photorhabdus, Salmonella, Serratia, Shewanella, Ureaplasma, Vibrio, or Yersinia polypeptide.

[0131] In one aspect, the chitin binding protein is a Bacillus alkalophilus, Bacillus amyloliquefaciens, Bacillus anthracis, Bacillus brevis, Bacillus cereus, Bacillus circulans, Bacillus clausii, Bacillus coagulans, Bacillus cytotoxicus, Bacillus firmus, Bacillus lautus, Bacillus lentus, Bacillus licheniformis, Bacillus megaterium, Bacillus mycoides, Bacillus pumilus, Bacillus stearothermophilus, Bacillus subtilis, Bacillus thuringiensis, Bacillus weihenstephanensis, or Lysinibacillus sphaericus polypeptide.

[0132] In another aspect, the chitin binding protein is a Streptococcus equisimilis, Streptococcus pyogenes, Streptococcus uberis, or Streptococcus equi subsp. Zooepidemicus polypeptide.

[0133] In another aspect, the chitin binding protein is a Streptomyces achromogenes, Streptomyces avermitilis, Streptomyces coelicolor, Streptomyces griseus, or Streptomyces lividans polypeptide.

[0134] The chitin binding protein may be a fungal chitin binding protein. For example, the chitin binding protein may be a yeast polypeptide such as a Candida, Kluyveromyces, Pichia, Saccharomyces, Schizosaccharomyces, or Yarrowia polypeptide; or a filamentous fungal polypeptide such as an Acremonium, Agaricus, Alternaria, Aspergillus, Aurantiporus, Aureobasidium, Botryospaeria, Ceriporiopsis, Chaetomidium, Chrysosporium, Claviceps, Cochliobolus, Coprinopsis, Coptotermes, Corynascus, Cryphonectria, Cryptococcus, Diplodia, Exidia, Filibasidium, Fusarium, Gibberella, Holomastigotoides, Humicola, Irpex, Lentinula, Leptospaeria, Magnaporthe, Melanocarpus, Meripilus, Mucor, Myceliophthora, Neocallimastix, Neurospora, Paecilomyces, Penicillium, Phanerochaete, Piromyces, Poitrasia, Pseudoplectania, Pseudotrichonympha, Rhizomucor, Schizophyllum, Scytalidium, Talaromyces, Thermoascus, Thielavia, Tolypocladium, Trichoderma, Trichophaea, Verticillium, Volvariella, or Xylaria polypeptide.

[0135] In another aspect, the chitin binding protein is a Saccharomyces carlsbergensis, Saccharomyces cerevisiae, Saccharomyces diastaticus, Saccharomyces douglasii, Saccharomyces kluyveri, Saccharomyces norbensis, or Saccharomyces oviformis polypeptide.

[0136] In another aspect, the chitin binding protein is an Acremonium cellulolyticus, Aspergillus aculeatus, Aspergillus awamori, Aspergillus foetidus, Aspergillus fumigatus, Aspergillus japonicus, Aspergillus nidulans, Aspergillus niger, Aspergillus oryzae, Chrysosporium inops, Chrysosporium keratinophilum, Chrysosporium lucknowense, Chrysosporium merdarium, Chrysosporium pannicola, Chrysosporium queenslandicum, Chrysosporium tropicum, Chrysosporium zonatum, Fusarium bactridioides, Fusarium cerealis, Fusarium crookwellense, Fusarium culmorum, Fusarium graminearum, Fusarium graminum, Fusarium heterosporum, Fusarium negundi, Fusarium oxysporum, Fusarium reticulatum, Fusarium roseum, Fusarium sambucinum, Fusarium sarcochroum, Fusarium sporotrichioides, Fusarium sulphureum, Fusarium torulosum, Fusarium trichothecioides, Fusarium venenatum, Humicola grisea, Humicola insolens, Humicola lanuginosa, Irpex lacteus, Mucor miehei, Myceliophthora thermophila, Neurospora crassa, Penicillium funiculosum, Penicillium purpurogenum, Phanerochaete chrysosporium, Thielavia achromatica, Thielavia albomyces, Thielavia albopilosa, Thielavia australeinsis, Thielavia fimeti, Thielavia microspora, Thielavia ovispora, Thielavia peruviana, Thielavia setosa, Thielavia spededonium, Thielavia subthermophila, Thielavia terrestris, Trichoderma harzianum, Trichoderma koningii, Trichoderma longibrachiatum, Trichoderma reesei, or Trichoderma viride polypeptide.

[0137] It will be understood that for the aforementioned species the invention encompasses both the perfect and imperfect states, and other taxonomic equivalents, e.g., anamorphs, regardless of the species name by which they are known. Those skilled in the art will readily recognize the identity of appropriate equivalents.

[0138] Strains of these species are readily accessible to the public in a number of culture collections, such as the American Type Culture Collection (ATCC), Deutsche Sammlung von Mikroorganismen and Zellkulturen GmbH (DSMZ), Centraalbureau Voor Schimmelcultures (CBS), and Agricultural Research Service Patent Culture Collection, Northern Regional Research Center (NRRL).

[0139] The chitin binding protein may be identified and obtained from other sources including microorganisms isolated from nature (e.g., soil, composts, water, etc.) using the above-mentioned probes. Techniques for isolating microorganisms from natural habitats are well known in the art. A polynucleotide encoding the chitin binding protein may then be obtained by similarly screening a genomic DNA or cDNA library of another microorganism or mixed DNA sample. Once a polynucleotide encoding a chitin binding protein has been detected with the probe(s), the polynucleotide can be isolated or cloned by utilizing techniques that are well known to those of ordinary skill in the art (see, e.g., Sambrook et al., 1989, supra).

### Polynucleotides

[0140] Polynucleotides encoding chitin binding proteins can be isolated and utilized to practice the methods of the present invention, as described herein.

[0141] The techniques used to isolate or clone a polynucleotide encoding a chitin binding protein are known in the art and include isolation from genomic DNA or cDNA, or a combination thereof. The cloning of the polynucleotides from genomic DNA can be effected, e.g., by using the well known polymerase chain reaction (PCR) or antibody screening of expression libraries to detect cloned DNA fragments with shared structural features. See, e.g., Innis et al., 1990, PCR: A Guide to Methods and Application, Academic Press, New York. Other nucleic acid amplification procedures such as ligase chain reaction (LCR), ligation activated transcription (LAT) and polynucleotide-based amplification (NASBA) may be used. The polynucleotides may be cloned from a bacterial strain, e.g., Bacillus or a related organism, and thus, for example, may be an allelic or species variant of the chitin binding protein encoding region of the polynucleotide.

[0142] Modification of a polynucleotide encoding a chitin binding protein may be necessary for synthesizing chitin binding proteins substantially similar to the chitin binding protein. The term “substantially similar” to the chitin binding protein refers to non-naturally occurring forms of the polypeptide. These polypeptides may differ in some engineered way from the polypeptide isolated from its native source, e.g., variants that differ in specific activity, thermostability, pH optimum, or the like. The variants may be constructed on the basis of the polynucleotide presented as the mature chitin binding protein coding sequence of SEQ ID NO: 1, SEQ ID NO: 3, SEQ ID NO: 5, SEQ ID NO: 7, SEQ ID NO: 9, SEQ ID NO: 11, SEQ ID NO: 13, SEQ ID NO: 15, SEQ ID NO: 17, SEQ ID NO: 19, SEQ ID NO: 21, SEQ ID NO: 23, SEQ ID NO: 25, SEQ ID NO: 27, SEQ ID NO: 29, SEQ ID NO: 31, SEQ ID NO: 33, SEQ ID NO: 35, SEQ ID NO: 37, SEQ ID NO: 39, SEQ ID NO: 41, SEQ ID NO: 43, SEQ ID NO: 45, SEQ ID NO: 47, SEQ ID NO: 49, SEQ ID NO: 51, SEQ ID NO: 53, SEQ ID NO: 55, SEQ ID NO: 57, SEQ ID NO: 59, SEQ ID NO: 61, SEQ ID NO: 63, SEQ ID NO: 65, SEQ ID NO: 67, SEQ ID NO: 69, SEQ ID NO: 71, SEQ ID NO: 73, SEQ ID NO: 75, SEQ ID NO: 77, SEQ ID NO: 79, SEQ ID NO: 81, SEQ ID NO: 83, SEQ ID NO: 85, SEQ ID NO: 87, SEQ ID NO: 89, SEQ ID NO: 91, SEQ ID NO: 93, SEQ ID NO: 95, SEQ ID NO: 97, SEQ ID NO: 99, SEQ ID NO: 101, SEQ ID NO: 103, SEQ ID NO: 105, SEQ ID NO: 107, SEQ ID NO: 109, SEQ ID NO: 111, SEQ ID NO: 113, SEQ ID NO: 115, SEQ ID NO: 117, SEQ ID NO: 119, SEQ ID NO: 121, SEQ ID NO: 123, SEQ ID NO: 125, SEQ ID NO: 127, SEQ ID NO: 129, SEQ ID NO: 131, SEQ ID NO: 133, SEQ ID NO: 135, SEQ ID NO: 137, SEQ ID NO: 139, SEQ ID NO: 141, SEQ ID NO: 143, SEQ ID NO: 145, SEQ ID NO: 147, SEQ ID NO: 149, SEQ ID NO: 151, SEQ ID NO: 153, SEQ ID NO: 155, SEQ ID NO: 157, SEQ ID NO: 159, SEQ ID NO: 161, SEQ ID NO: 163, SEQ ID NO: 165, SEQ ID NO: 167, SEQ ID NO: 169, SEQ ID NO: 171, SEQ ID NO: 173, SEQ ID NO: 175, SEQ ID NO: 177, or SEQ ID NO: 179, or the CBM33 coding sequence thereof, or a subsequence thereof, and/or by introduction of nucleotide substitutions that do not result in a change in the amino acid sequence of the polypeptide, but which correspond to the codon usage of the host organism intended for production of the enzyme, or by introduction of nucleotide substitutions that may give rise to a different amino acid sequence. For a general description of nucleotide substitution, see, e.g., Ford et al., 1991, Protein Expression and Purification 2: 95-107.

### Nucleic Acid Constructs

[0143] A polynucleotide encoding a chitin binding protein or an enzyme of interest may be operably linked to one or more (e.g., several) control sequences that direct the expression of the coding sequence in a suitable host cell under conditions compatible with the control sequences.

[0144] The polynucleotide may be manipulated in a variety of ways to provide for expression of the chitin binding protein. Manipulation of the polynucleotide prior to its insertion into a vector may be desirable or necessary depending on the expression vector. The techniques for modifying polynucleotides utilizing recombinant DNA methods are well known in the art.

[0145] The control sequence may be a promoter, a polynucleotide that is recognized by a host cell for expression of a polynucleotide encoding the chitin binding protein. The promoter contains transcriptional control sequences that mediate the expression of the chitin binding protein. The promoter may be any polynucleotide that shows transcriptional activity in the host cell including mutant, truncated, and hybrid promoters, and may be obtained from genes encoding extracellular or intracellular polypeptides either homologous or heterologous to the host cell.

[0146] Examples of suitable promoters for directing transcription of the nucleic acid constructs in a bacterial host cell are the promoters obtained from the Bacillus amyloliquefaciens alpha-amylase gene (amyQ), Bacillus licheniformis alpha-amylase gene (amyL), Bacillus licheniformis penicillinase gene (penP), Bacillus stearothermophilus maltogenic amylase gene (amyM), Bacillus subtilis levansucrase gene (sacB), Bacillus subtilis xylA and xylB genes, Bacillus thuringiensis ctyIIIA gene (Agaisse and Lereclus, 1994, Molecular Microbiology 13: 97-107), E. coli lac operon, E. coli trc promoter (Egon et al., 1988, Gene 69: 301-315), Streptomyces coelicolor agarase gene (dagA), and prokaryotic beta-lactamase gene (VIIIa-Kamaroff et al., 1978, Proc. Natl. Acad. Sci. USA 75: 3727-3731), as well as the tac promoter (DeBoer et al., 1983, Proc. Natl. Acad. Sci. USA 80: 21-25). Further promoters are described in “Useful proteins from recombinant bacteria” in Gilbert et al., 1980, Scientific American 242: 74-94; and in Sambrook et al., 1989, supra. Examples of tandem promoters are disclosed in WO 99/43835.

[0147] Examples of suitable promoters for directing transcription of the nucleic acid constructs in a filamentous fungal host cell are promoters obtained from the genes for Aspergillus nidulans acetamidase, Aspergillus niger neutral alpha-amylase, Aspergillus niger acid stable alpha-amylase, Aspergillus niger or Aspergillus awamori glucoamylase (glaA), Aspergillus oryzae TAKA amylase, Aspergillus oryzae alkaline protease, Aspergillus oryzae triose phosphate isomerase, Fusarium oxysporum trypsin-like protease (WO 96/00787), Fusarium venenatum amyloglucosidase (WO 00/56900), Fusarium venenatum Dana (WO 00/56900), Fusarium venenatum Quinn (WO 00/56900), Rhizomucor miehei lipase, Rhizomucor miehei aspartic proteinase, Trichoderma reesei beta-glucosidase, Trichoderma reesei cellobiohydrolase I, Trichoderma reesei cellobiohydrolase II, Trichoderma reesei endoglucanase I, Trichoderma reesei endoglucanase II, Trichoderma reesei endoglucanase III, Trichoderma reesei endoglucanase V, Trichoderma reesei xylanase I, Trichoderma reesei xylanase II, Trichoderma reesei xylanase III, Trichoderma reesei beta-xylosidase, and Trichoderma reesei translation elongation factor, as well as the NA2-tpi promoter (a modified promoter from an Aspergillus neutral alpha-amylase gene in which the untranslated leader has been replaced by an untranslated leader from an Aspergillus triose phosphate isomerase gene; non-limiting examples include modified promoters from an Aspergillus niger neutral alpha-amylase gene in which the untranslated leader has been replaced by an untranslated leader from an Aspergillus nidulans or Aspergillus oryzae triose phosphate isomerase gene); and mutant, truncated, and hybrid promoters thereof. Other promoters are described in U.S. Pat. No. 6,011,147.

[0148] In a yeast host, useful promoters are obtained from the genes for Saccharomyces cerevisiae enolase (ENO-1), Saccharomyces cerevisiae galactokinase (GAL1), Saccharomyces cerevisiae alcohol dehydrogenase/glyceraldehyde-3-phosphate dehydrogenase (ADH1, ADH2/GAP), Saccharomyces cerevisiae triose phosphate isomerase (TPI), Saccharomyces cerevisiae metallothionein (CUP1), and Saccharomyces cerevisiae 3-phosphoglycerate kinase. Other useful promoters for yeast host cells are described by Romanos et al., 1992, Yeast 8: 423-488.

[0149] The control sequence may also be a transcription terminator, which is recognized by a host cell to terminate transcription. The terminator is operably linked to the 3′-terminus of the polynucleotide encoding the chitin binding protein. Any terminator that is functional in the host cell may be used in the present invention.

[0150] Preferred terminators for bacterial host cells are obtained from the genes for Bacillus clausii alkaline protease (aprH), Bacillus licheniformis alpha-amylase (amyL), and Escherichia coli ribosomal RNA (rrnB).

[0151] Preferred terminators for filamentous fungal host cells are obtained from the genes for Aspergillus nidulans acetamidase, Aspergillus nidulans anthranilate synthase, Aspergillus niger glucoamylase, Aspergillus niger alpha-glucosidase, Aspergillus oryzae TAKA amylase, Fusarium oxysporum trypsin-like protease, Trichoderma reesei beta-glucosidase, Trichoderma reesei cellobiohydrolase I, Trichoderma reesei cellobiohydrolase II, Trichoderma reesei endoglucanase I, Trichoderma reesei endoglucanase II, Trichoderma reesei endoglucanase III, Trichoderma reesei endoglucanase V, Trichoderma reesei xylanase I, Trichoderma reesei xylanase II, Trichoderma reesei xylanase III, Trichoderma reesei beta-xylosidase, and Trichoderma reesei translation elongation factor.

[0152] Preferred terminators for yeast host cells are obtained from the genes for Saccharomyces cerevisiae enolase, Saccharomyces cerevisiae cytochrome C (CYC1), and Saccharomyces cerevisiae glyceraldehyde-3-phosphate dehydrogenase. Other useful terminators for yeast host cells are described by Romanos et al., 1992, supra.

[0153] The control sequence may also be an mRNA stabilizer region downstream of a promoter and upstream of the coding sequence of a gene which increases expression of the gene.

[0154] Examples of suitable mRNA stabilizer regions are obtained from a Bacillus thuringiensis cryIIIA gene (WO 94/25612) and a Bacillus subtilis SP82 gene (Hue et al., 1995, Journal of Bacteriology 177: 3465-3471).

[0155] The control sequence may also be a leader, a nontranslated region of an mRNA that is important for translation by the host cell. The leader is operably linked to the 5′-terminus of the polynucleotide encoding the chitin binding protein. Any leader that is functional in the host cell may be used.

[0156] Preferred leaders for filamentous fungal host cells are obtained from the genes for Aspergillus oryzae TAKA amylase and Aspergillus nidulans triose phosphate isomerase.

[0157] Suitable leaders for yeast host cells are obtained from the genes for Saccharomyces cerevisiae enolase (ENO-1), Saccharomyces cerevisiae 3-phosphoglycerate kinase, Saccharomyces cerevisiae alpha-factor, and Saccharomyces cerevisiae alcohol dehydrogenase/glyceraldehyde-3-phosphate dehydrogenase (ADH2/GAP).

[0158] The control sequence may also be a polyadenylation sequence, a sequence operably linked to the 3′-terminus of the polynucleotide and, when transcribed, is recognized by the host cell as a signal to add polyadenosine residues to transcribed mRNA. Any polyadenylation sequence that is functional in the host cell may be used.

[0159] Preferred polyadenylation sequences for filamentous fungal host cells are obtained from the genes for Aspergillus nidulans anthranilate synthase, Aspergillus niger glucoamylase, Aspergillus niger alpha-glucosidase Aspergillus oryzae TAKA amylase, and Fusarium oxysporum trypsin-like protease.

[0160] Useful polyadenylation sequences for yeast host cells are described by Guo and Sherman, 1995, Mol. Cellular Biol. 15: 5983-5990.

[0161] The control sequence may also be a signal peptide coding region that encodes a signal peptide linked to the N-terminus of a chitin binding protein and directs the chitin binding protein into the cell's secretory pathway. The 5′-end of the coding sequence of the polynucleotide may inherently contain a signal peptide coding sequence naturally linked in translation reading frame with the segment of the coding sequence that encodes the chitin binding protein. Alternatively, the 5′-end of the coding sequence may contain a signal peptide coding sequence that is foreign to the coding sequence. A foreign signal peptide coding sequence may be required where the coding sequence does not naturally contain a signal peptide coding sequence. Alternatively, a foreign signal peptide coding sequence may simply replace the natural signal peptide coding sequence in order to enhance secretion of the chitin binding protein. However, any signal peptide coding sequence that directs the expressed chitin binding protein into the secretory pathway of a host cell may be used.

[0162] Effective signal peptide coding sequences for bacterial host cells are the signal peptide coding sequences obtained from the genes for Bacillus NCIB 11837 maltogenic amylase, Bacillus licheniformis subtilisin, Bacillus licheniformis beta-lactamase, Bacillus stearothermophilus alpha-amylase, Bacillus stearothermophilus neutral proteases (nprT, nprS, nprM), and Bacillus subtilis prsA. Further signal peptides are described by Simonen and Palva, 1993, Microbiological Reviews 57: 109-137.

[0163] Effective signal peptide coding sequences for filamentous fungal host cells are the signal peptide coding sequences obtained from the genes for Aspergillus niger neutral amylase, Aspergillus niger glucoamylase, Aspergillus oryzae TAKA amylase, Humicola insolens cellulase, Humicola insolens endoglucanase V, Humicola lanuginosa lipase, and Rhizomucor miehei aspartic proteinase.

[0164] Useful signal peptides for yeast host cells are obtained from the genes for Saccharomyces cerevisiae alpha-factor and Saccharomyces cerevisiae invertase. Other useful signal peptide coding sequences are described by Romanos et al., 1992, supra.

[0165] The control sequence may also be a propeptide coding sequence that encodes a propeptide positioned at the N-terminus of a chitin binding protein. The resultant polypeptide is known as a proenzyme or propolypeptide (or a zymogen in some cases). A propolypeptide is generally inactive and can be converted to an active chitin binding protein by catalytic or autocatalytic cleavage of the propeptide from the propolypeptide. The propeptide coding sequence may be obtained from the genes for Bacillus subtilis alkaline protease (aprE), Bacillus subtilis neutral protease (nprT), Myceliophthora thermophila laccase (WO 95/33836), Rhizomucor miehei aspartic proteinase, and Saccharomyces cerevisiae alpha-factor.

[0166] Where both signal peptide and propeptide sequences are present at the N-terminus of a chitin binding protein, the propeptide sequence is positioned next to the N-terminus of a chitin binding protein and the signal peptide sequence is positioned next to the N-terminus of the propeptide sequence.

[0167] It may also be desirable to add regulatory sequences that regulate expression of the chitin binding protein relative to the growth of the host cell. Examples of regulatory sequences are those that cause expression of the gene to be turned on or off in response to a chemical or physical stimulus, including the presence of a regulatory compound. Regulatory sequences in prokaryotic systems include the lac, tac, and trp operator systems.

[0168] In yeast, the ADH2 system or GAL1 system may be used. In filamentous fungi, the Aspergillus niger glucoamylase promoter, Aspergillus oryzae TAKA alpha-amylase promoter, and Aspergillus oryzae glucoamylase promoter, Trichoderma reesei cellobiohydrolase I promoter, and Trichoderma reesei cellobiohydrolase II promoter may be used. Other examples of regulatory sequences are those that allow for gene amplification. In eukaryotic systems, these regulatory sequences include the dihydrofolate reductase gene that is amplified in the presence of methotrexate, and the metallothionein genes that are amplified with heavy metals. In these cases, the polynucleotide encoding the chitin binding protein would be operably linked to the regulatory sequence.

### Expression Vectors

[0169] A polynucleotide encoding a chitin binding protein or an enzyme of interest and various nucleic acids and control sequences described herein may be joined together to produce a recombinant expression vector that may include one or more (e.g., several) convenient restriction sites to allow for insertion or substitution of the polynucleotide at such sites. Alternatively, the polynucleotide may be expressed by inserting the polynucleotide or a nucleic acid construct comprising the polynucleotide into an appropriate vector for expression. In creating the expression vector, the coding sequence is located in the vector so that the coding sequence is operably linked with the appropriate control sequences for expression.

[0170] The recombinant expression vector may be any vector (e.g., a plasmid or virus) that can be conveniently subjected to recombinant DNA procedures and can bring about expression of the polynucleotide. The choice of the vector will typically depend on the compatibility of the vector with the host cell into which the vector is to be introduced. The vector may be a linear or closed circular plasmid.

[0171] The vector may be an autonomously replicating vector, i.e., a vector that exists as an extrachromosomal entity, the replication of which is independent of chromosomal replication, e.g., a plasmid, an extrachromosomal element, a minichromosome, or an artificial chromosome. The vector may contain any means for assuring self-replication. Alternatively, the vector may be one that, when introduced into the host cell, is integrated into the genome and replicated together with the chromosome(s) into which it has been integrated. Furthermore, a single vector or plasmid or two or more vectors or plasmids that together contain the total DNA to be introduced into the genome of the host cell, or a transposon, may be used.

[0172] The vector preferably contains one or more (e.g., several) selectable markers that permit easy selection of transformed, transfected, transduced, or the like cells. A selectable marker is a gene the product of which provides for biocide or viral resistance, resistance to heavy metals, prototrophy to auxotrophs, and the like.

[0173] Examples of bacterial selectable markers are Bacillus licheniformis or Bacillus subtilis dal genes, or markers that confer antibiotic resistance such as ampicillin, chloramphenicol, kanamycin, neomycin, spectinomycin, or tetracycline resistance. Suitable markers for yeast host cells include, but are not limited to, ADE2, HIS3, LEU2, LYS2, MET3, TRP1, and URA3. Selectable markers for use in a filamentous fungal host cell include, but are not limited to, adeA (phosphoribosylaminoimidazole-succinocarboxamide synthase), adeB (phosphoribosyl-aminoimidazole synthase), amdS (acetamidase), argB (ornithine carbamoyltransferase), bar (phosphinothricin acetyltransferase), hph (hygromycin phosphotransferase), niaD (nitrate reductase), pyrG (orotidine-5′-phosphate decarboxylase), sC (sulfate adenyltransferase), and trpC (anthranilate synthase), as well as equivalents thereof. Preferred for use in an Aspergillus cell are Aspergillus nidulans or Aspergillus oryzae amdS and pyrG genes and a Streptomyces hygroscopicus bar gene. Preferred for use in a Trichoderma cell are adeA, adeB, amdS, hph, and pyrG genes.

[0174] The selectable marker may be a dual selectable marker system as described in WO 2010/039889. In one aspect, the dual selectable marker is a hph-tk dual selectable marker system.

[0175] The vector preferably contains an element(s) that permits integration of the vector into the host cell's genome or autonomous replication of the vector in the cell independent of the genome.

[0176] For integration into the host cell genome, the vector may rely on the polynucleotide's sequence encoding the chitin binding protein or any other element of the vector for integration into the genome by homologous or non-homologous recombination. Alternatively, the vector may contain additional polynucleotides for directing integration by homologous recombination into the genome of the host cell at a precise location(s) in the chromosome(s). To increase the likelihood of integration at a precise location, the integrational elements should contain a sufficient number of nucleic acids, such as 100 to 10,000 base pairs, 400 to 10,000 base pairs, and 800 to 10,000 base pairs, which have a high degree of sequence identity to the corresponding target sequence to enhance the probability of homologous recombination. The integrational elements may be any sequence that is homologous with the target sequence in the genome of the host cell. Furthermore, the integrational elements may be non-encoding or encoding polynucleotides. On the other hand, the vector may be integrated into the genome of the host cell by non-homologous recombination.

[0177] For autonomous replication, the vector may further comprise an origin of replication enabling the vector to replicate autonomously in the host cell in question. The origin of replication may be any plasmid replicator mediating autonomous replication that functions in a cell. The term “origin of replication” or “plasmid replicator” means a polynucleotide that enables a plasmid or vector to replicate in vivo.

[0178] Examples of bacterial origins of replication are the origins of replication of plasmids pBR322, pUC19, pACYC177, and pACYC184 permitting replication in E. coli, and pUB110, pE194, pTA1060, and pAMR1 permitting replication in Bacillus.

[0179] Examples of origins of replication for use in a yeast host cell are the 2 micron origin of replication, ARS1, ARS4, the combination of ARS1 and CEN3, and the combination of ARS4 and CEN6.

[0180] Examples of origins of replication useful in a filamentous fungal cell are AMA1 and ANSI (Gems et al., 1991, Gene 98: 61-67; Cullen et al., 1987, Nucleic Acids Res. 15: 9163-9175; WO 00/24883). Isolation of the AMA1 gene and construction of plasmids or vectors comprising the gene can be accomplished according to the methods disclosed in WO 00/24883.

[0181] More than one copy of a polynucleotide may be inserted into a host cell to increase production of a chitin binding protein. An increase in the copy number of the polynucleotide can be obtained by integrating at least one additional copy of the sequence into the host cell genome or by including an amplifiable selectable marker gene with the polynucleotide where cells containing amplified copies of the selectable marker gene, and thereby additional copies of the polynucleotide, can be selected for by cultivating the cells in the presence of the appropriate selectable agent.

[0182] The procedures used to ligate the elements described above to construct the recombinant expression vectors are well known to one skilled in the art (see, e.g., Sambrook et al., 1989, supra).

### Host Cells

[0183] Recombinant host cells comprising a polynucleotide encoding a chitin binding protein or an enzyme of interest operably linked to one or more (e.g., several) control sequences that direct the production of a chitin binding protein can be advantageously used in the recombinant production of the chitin binding protein. A construct or vector comprising a polynucleotide is introduced into a host cell so that the construct or vector is maintained as a chromosomal integrant or as a self-replicating extra-chromosomal vector as described earlier. The term “host cell” encompasses any progeny of a parent cell that is not identical to the parent cell due to mutations that occur during replication. The choice of a host cell will to a large extent depend upon the gene encoding the chitin binding protein and its source.

[0184] The host cell may be any cell useful in the recombinant production of a chitin binding protein, e.g., a prokaryote or a eukaryote.

[0185] The prokaryotic host cell may be any Gram-positive or Gram-negative bacterium. Gram-positive bacteria include, but are not limited to, Bacillus, Clostridium, Enterococcus, Geobacillus, Lactobacillus, Lactococcus, Oceanobacillus, Staphylococcus, Streptococcus, and Streptomyces. Gram-negative bacteria include, but are not limited to, Campylobacter, E. coli, Flavobacterium, Fusobacterium, Helicobacter, Ilyobacter, Neisseria, Pseudomonas, Salmonella, and Ureaplasma.

[0186] The bacterial host cell may be any Bacillus cell including, but not limited to, Bacillus alkalophilus, Bacillus amyloliquefaciens, Bacillus brevis, Bacillus circulans, Bacillus clausii, Bacillus coagulans, Bacillus firmus, Bacillus lautus, Bacillus lentus, Bacillus licheniformis, Bacillus megaterium, Bacillus pumilus, Bacillus stearothermophilus, Bacillus subtilis, and Bacillus thuringiensis cells.

[0187] The bacterial host cell may also be any Streptococcus cell including, but not limited to, Streptococcus equisimilis, Streptococcus pyogenes, Streptococcus uberis, and Streptococcus equi subsp. Zooepidemicus cells.

[0188] The bacterial host cell may also be any Streptomyces cell including, but not limited to, Streptomyces achromogenes, Streptomyces avermitilis, Streptomyces coelicolor, Streptomyces griseus, and Streptomyces lividans cells.

[0189] The introduction of DNA into a Bacillus cell may be effected by protoplast transformation (see, e.g., Chang and Cohen, 1979, Mol. Gen. Genet. 168: 111-115), competent cell transformation (see, e.g., Young and Spizizen, 1961, J. Bacteriol. 81: 823-829, or Dubnau and Davidoff-Abelson, 1971, J. Mol. Biol. 56: 209-221), electroporation (see, e.g., Shigekawa and Dower, 1988, Biotechniques 6: 742-751), or conjugation (see, e.g., Koehler and Thorne, 1987, J. Bacteriol. 169: 5271-5278). The introduction of DNA into an E. coli cell may be effected by protoplast transformation (see, e.g., Hanahan, 1983, J. Mol. Biol. 166: 557-580) or electroporation (see, e.g., Dower et al., 1988, Nucleic Acids Res. 16: 6127-6145). The introduction of DNA into a Streptomyces cell may be effected by protoplast transformation, electroporation (see, e.g., Gong et al., 2004, Folia Microbiol. (Praha) 49: 399-405), conjugation (see, e.g., Mazodier et al., 1989, J. Bacteriol. 171: 3583-3585), or transduction (see, e.g., Burke et al., 2001, Proc. Natl. Acad. Sci. USA 98: 6289-6294). The introduction of DNA into a Pseudomonas cell may be effected by electroporation (see, e.g., Choi et al., 2006, J. Microbiol. Methods 64: 391-397) or conjugation (see, e.g., Pinedo and Smets, 2005, Appl. Environ. Microbiol. 71: 51-57). The introduction of DNA into a Streptococcus cell may be effected by natural competence (see, e.g., Perry and Kuramitsu, 1981, Infect. Immun. 32: 1295-1297), protoplast transformation (see, e.g., Catt and Jollick, 1991, Microbios 68: 189-207), electroporation (see, e.g., Buckley et al., 1999, Appl. Environ. Microbiol. 65: 3800-3804), or conjugation (see, e.g., Clewell, 1981, Microbiol. Rev. 45: 409-436). However, any method known in the art for introducing DNA into a host cell can be used.

[0190] The host cell may also be a eukaryote, such as a mammalian, insect, plant, or fungal cell.

[0191] The host cell may be a fungal cell. “Fungi” as used herein includes the phyla Ascomycota, Basidiomycota, Chytridiomycota, and Zygomycota as well as the Oomycota and all mitosporic fungi (as defined by Hawksworth et al., In, Ainsworth and Bisby's Dictionary of The Fungi, 8th edition, 1995, CAB International, University Press, Cambridge, UK).

[0192] The fungal host cell may be a yeast cell. “Yeast” as used herein includes ascosporogenous yeast (Endomycetales), basidiosporogenous yeast, and yeast belonging to the Fungi Imperfecti (Blastomycetes). Since the classification of yeast may change in the future, for the purposes of this invention, yeast shall be defined as described in Biology and Activities of Yeast (Skinner, Passmore, and Davenport, editors, Soc. App. Bacteriol. Symposium Series No. 9, 1980).

[0193] The yeast host cell may be a Candida, Hansenula, Kluyveromyces, Pichia, Saccharomyces, Schizosaccharomyces, or Yarrowia cell, such as a Kluyveromyces lactis, Saccharomyces carlsbergensis, Saccharomyces cerevisiae, Saccharomyces diastaticus, Saccharomyces douglasii, Saccharomyces kluyveri, Saccharomyces norbensis, Saccharomyces oviformis, or Yarrowia lipolytica cell.

[0194] The fungal host cell may be a filamentous fungal cell. “Filamentous fungi” include all filamentous forms of the subdivision Eumycota and Oomycota (as defined by Hawksworth et al., 1995, supra). The filamentous fungi are generally characterized by a mycelial wall composed of chitin, cellulose, glucan, chitosan, mannan, and other complex polysaccharides. Vegetative growth is by hyphal elongation and carbon catabolism is obligately aerobic. In contrast, vegetative growth by yeasts such as Saccharomyces cerevisiae is by budding of a unicellular thallus and carbon catabolism may be fermentative.

[0195] The filamentous fungal host cell may be an Acremonium, Aspergillus, Aureobasidium, Bjerkandera, Ceriporiopsis, Chrysosporium, Coprinus, Coriolus, Cryptococcus, Filibasidium, Fusarium, Humicola, Magnaporthe, Mucor, Myceliophthora, Neocallimastix, Neurospora, Paecilomyces, Penicillium, Phanerochaete, Phlebia, Piromyces, Pleurotus, Schizophyllum, Talaromyces, Thermoascus, Thielavia, Tolypocladium, Trametes, or Trichoderma cell.

[0196] For example, the filamentous fungal host cell may be an Aspergillus awamori, Aspergillus foetidus, Aspergillus fumigatus, Aspergillus japonicus, Aspergillus nidulans, Aspergillus niger, Aspergillus oryzae, Bjerkandera adusta, Ceriporiopsis aneirina, Ceriporiopsis caregiea, Ceriporiopsis gilvescens, Ceriporiopsis pannocinta, Ceriporiopsis rivulosa, Ceriporiopsis subrufa, Ceriporiopsis subvermispora, Chrysosporium inops, Chrysosporium keratinophilum, Chrysosporium lucknowense, Chrysosporium merdarium, Chrysosporium pannicola, Chrysosporium queenslandicum, Chrysosporium tropicum, Chrysosporium zonatum, Coprinus cinereus, Coriolus hirsutus, Fusarium bactridioides, Fusarium cerealis, Fusarium crookwellense, Fusarium culmorum, Fusarium graminearum, Fusarium graminum, Fusarium heterosporum, Fusarium negundi, Fusarium oxysporum, Fusarium reticulatum, Fusarium roseum, Fusarium sambucinum, Fusarium sarcochroum, Fusarium sporotrichioides, Fusarium sulphureum, Fusarium torulosum, Fusarium trichothecioides, Fusarium venenatum, Humicola insolens, Humicola lanuginosa, Mucor miehei, Myceliophthora thermophila, Neurospora crassa, Penicillium purpurogenum, Phanerochaete chrysosporium, Phlebia radiata, Pleurotus eryngii, Thielavia terrestris, Trametes villosa, Trametes versicolor, Trichoderma harzianum, Trichoderma koningii, Trichoderma longibrachiatum, Trichoderma reesei, or Trichoderma viride cell.

[0197] Fungal cells may be transformed by a process involving protoplast formation, transformation of the protoplasts, and regeneration of the cell wall in a manner known per se. Suitable procedures for transformation of Aspergillus and Trichoderma host cells are described in EP 238023, Yelton et al., 1984, Proc. Natl. Acad. Sci. USA 81: 1470-1474, and Christensen et al., 1988, Bio/Technology 6: 1419-1422. Suitable methods for transforming Fusarium species are described by Malardier et al., 1989, Gene 78: 147-156, and WO 96/00787. Yeast may be transformed using the procedures described by Becker and Guarente, In Abelson, J. N. and Simon, M. I., editors, Guide to Yeast Genetics and Molecular Biology, Methods in Enzymology, Volume 194, pp 182-187, Academic Press, Inc., New York; Ito et al., 1983, J. Bacteriol. 153: 163; and Hinnen et al., 1978, Proc. Natl. Acad. Sci. USA 75: 1920.

### Methods of Production

[0198] A chitin binding protein can be produced using methods comprising: (a) cultivating a cell, which in its wild-type form produces the chitin binding protein, under conditions conducive for production of the chitin binding protein; and optionally (b) recovering the chitin binding protein.

[0199] A chitin binding protein can also be produced using methods comprising: (a) cultivating a recombinant host cell under conditions conducive for production of the chitin binding protein; and optionally (b) recovering the chitin binding protein.

[0200] The host cells are cultivated in a nutrient medium suitable for production of the chitin binding protein using methods known in the art. For example, the cells may be cultivated by shake flask cultivation, or small-scale or large-scale fermentation (including continuous, batch, fed-batch, or solid state fermentations) in laboratory or industrial fermentors in a suitable medium and under conditions allowing the chitin binding protein to be expressed and/or isolated. The cultivation takes place in a suitable nutrient medium comprising carbon and nitrogen sources and inorganic salts, using procedures known in the art. Suitable media are available from commercial suppliers or may be prepared according to published compositions (e.g., in catalogues of the American Type Culture Collection). If the chitin binding protein is secreted into the nutrient medium, the polypeptide can be recovered directly from the medium. If the chitin binding protein is not secreted, it can be recovered from cell lysates.

[0201] The chitin binding protein may be detected using methods known in the art that are specific for the chitin binding proteins. These detection methods include, but are not limited to, use of specific antibodies, adsorption by chitin, enhancement of chitinase reaction on chitin, or specific activity on chitin. For example, an enzyme assay based on oxidative chitin degradation may be used to determine the amount or activity of the chitin binding protein (Vanje-Kolstad et al., 2010, Science 330: 219).

[0202] The chitin binding protein may be recovered using methods known in the art. For example, the chitin binding protein may be recovered from the nutrient medium by conventional procedures including, but not limited to, collection, centrifugation, filtration, extraction, spray-drying, evaporation, or precipitation. In one aspect, a fermentation broth comprising the polypeptide is recovered.

[0203] The chitin binding protein may be purified by a variety of procedures known in the art including, but not limited to, chromatography (e.g., ion exchange, affinity, hydrophobic, chromatofocusing, and size exclusion), electrophoretic procedures (e.g., preparative isoelectric focusing), differential solubility (e.g., ammonium sulfate precipitation), SDS-PAGE, or extraction (see, e.g., Protein Purification, Janson and Ryden, editors, VCH Publishers, New York, 1989) to obtain substantially pure chitin binding proteins.

[0204] In an alternative aspect, the chitin binding protein is not recovered, but rather a host cell expressing the polypeptide is used as a source of the chitin binding protein.

[0205] An enzyme of interest can also be produced, recovered, and/or purified by the methods described above.

### Fermentation Broth Formulations or Cell Compositions

[0206] The present invention also relates to a fermentation broth formulation or a cell composition comprising a chitin binding protein. In one aspect, the fermentation broth formulation or a cell composition comprises a chitin binding protein and a GH61 polypeptide having cellulolytic enhancing activity. The fermentation broth product further comprises additional ingredients used in the fermentation process, such as, for example, cells (including, the host cells containing the gene encoding the polypeptide of the present invention which are used to produce the polypeptide of interest), cell debris, biomass, fermentation media and/or fermentation products. In some embodiments, the composition is a cell-killed whole broth containing organic acid(s), killed cells and/or cell debris, and culture medium.

[0207] The term “fermentation broth” as used herein refers to a preparation produced by cellular fermentation that undergoes no or minimal recovery and/or purification. For example, fermentation broths are produced when microbial cultures are grown to saturation, incubated under carbon-limiting conditions to allow protein synthesis (e.g., expression of enzymes by host cells) and secretion into cell culture medium. The fermentation broth can contain unfractionated or fractionated contents of the fermentation materials derived at the end of the fermentation. Typically, the fermentation broth is unfractionated and comprises the spent culture medium and cell debris present after the microbial cells (e.g., filamentous fungal or bacterial cells) are removed, e.g., by centrifugation. In some embodiments, the fermentation broth contains spent cell culture medium, extracellular enzymes, and viable and/or nonviable microbial cells.

[0208] In an embodiment, the fermentation broth formulation and cell compositions comprise a first organic acid component comprising at least one 1-5 carbon organic acid and/or a salt thereof and a second organic acid component comprising at least one 6 or more carbon organic acid and/or a salt thereof. In a specific embodiment, the first organic acid component is acetic acid, formic acid, propionic acid, a salt thereof, or a mixture of two or more of the foregoing and the second organic acid component is benzoic acid, cyclohexanecarboxylic acid, 4-methylvaleric acid, phenylacetic acid, a salt thereof, or a mixture of two or more of the foregoing.

[0209] In one aspect, the composition contains an organic acid(s), and optionally further contains killed cells and/or cell debris. In one embodiment, the killed cells and/or cell debris are removed from a cell-killed whole broth to provide a composition that is free of these components.

[0210] The fermentation broth formulations or cell compositions may further comprise a preservative and/or anti-microbial (e.g., bacteriostatic) agent, including, but not limited to, sorbitol, sodium chloride, potassium sorbate, and others known in the art.

[0211] The cell-killed whole broth or composition may further comprise one or more (e.g., several) additional enzymes selected from the group consisting of a cellulase, a GH61 polypeptide having cellulolytic enhancing activity, a hemicellulase, an esterase, an expansin, a laccase, a ligninolytic enzyme, a pectinase, a peroxidase, a protease, and a swollenin.

[0212] The cell-killed whole broth or composition may contain the unfractionated contents of the fermentation materials derived at the end of the fermentation. Typically, the cell-killed whole broth or composition contains the spent culture medium and cell debris present after the microbial cells (e.g., filamentous fungal or bacterial cells) are grown to saturation, incubated under carbon-limiting conditions to allow protein synthesis. In some embodiments, the cell-killed whole broth or composition contains the spent cell culture medium, extracellular enzymes, and killed filamentous fungal or bacterial cells. In some embodiments, the microbial cells present in the cell-killed whole broth or composition can be permeabilized and/or lysed using methods known in the art.

[0213] A whole broth or cell composition as described herein is typically a liquid, but may contain insoluble components, such as killed cells, cell debris, culture media components, and/or insoluble enzyme(s). In some embodiments, insoluble components may be removed to provide a clarified liquid composition.

[0214] The whole broth formulations and cell compositions of the present invention may be produced by a method described in WO 90/15861 or WO 2010/096673.

### Enzyme Compositions

[0215] The present invention also relates to compositions comprising a chitin binding protein. Preferably, the compositions are enriched in such a protein. The term “enriched” indicates that the chitin binding protein activity of the composition has been increased, e.g., with an enrichment factor of at least 1.1.

[0216] The compositions may comprise a chitin binding protein as the major component, e.g., a mono-component composition. Alternatively, the compositions may comprise multiple enzymatic activities, such as one or more (e.g., several) additional enzymes selected from the group consisting of a cellulase, a GH61 polypeptide having cellulolytic enhancing activity, a hemicellulase, an esterase, an expansin, a laccase, a ligninolytic enzyme, a pectinase, a peroxidase, a protease, and a swollenin. In one aspect, the composition comprises a chitin binding protein and a GH61 polypeptide having cellulolytic enhancing activity.

[0217] The compositions may be prepared in accordance with methods known in the art and may be in the form of a liquid or a dry composition. The compositions may be stabilized in accordance with methods known in the art.

[0218] Examples are given below of preferred uses of the compositions of the present invention. The dosage of the composition and other conditions under which the composition is used may be determined on the basis of methods known in the art.

### Processing of Cellulosic Material

[0219] The processing of a cellulosic material according to the methods of the present invention can be accomplished using processes conventional in the art. Moreover, the methods of the present invention can be implemented using any conventional biomass processing apparatus configured to operate in accordance with the invention. The production of a desired fermentation product from the cellulosic material typically involves pretreatment, enzymatic hydrolysis (saccharification), and fermentation.

[0220] Hydrolysis (saccharification) and fermentation, separate or simultaneous, include, but are not limited to, separate hydrolysis and fermentation (SHF); simultaneous saccharification and fermentation (SSF); simultaneous saccharification and co-fermentation (SSCF); hybrid hydrolysis and fermentation (HHF); separate hydrolysis and co-fermentation (SHCF); hybrid hydrolysis and co-fermentation (HHCF); and direct microbial conversion (DMC), also sometimes called consolidated bioprocessing (CBP). SHF uses separate process steps to first enzymatically hydrolyze the cellulosic material to fermentable sugars, e.g., glucose, cellobiose, and pentose monomers, and then ferment the fermentable sugars to ethanol. In SSF, the enzymatic hydrolysis of the cellulosic material and the fermentation of sugars to ethanol are combined in one step (Philippidis, G. P., 1996, Cellulose bioconversion technology, in Handbook on Bioethanol: Production and Utilization, Wyman, C. E., ed., Taylor & Francis, Washington, D.C., 179-212). SSCF involves the co-fermentation of multiple sugars (Sheehan, J., and Himmel, M., 1999, Enzymes, energy and the environment: A strategic perspective on the U.S. Department of Energy's research and development activities for bioethanol, Biotechnol. Prog. 15: 817-827). HHF involves a separate hydrolysis step, and in addition a simultaneous saccharification and hydrolysis step, which can be carried out in the same reactor. The steps in an HHF process can be carried out at different temperatures, i.e., high temperature enzymatic saccharification followed by SSF at a lower temperature that the fermentation strain can tolerate. DMC combines all three processes (enzyme production, hydrolysis, and fermentation) in one or more (e.g., several) steps where the same organism is used to produce the enzymes for conversion of the cellulosic material to fermentable sugars and to convert the fermentable sugars into a final product (Lynd, L. R., Weimer, P. J., van Zyl, W. H., and Pretorius, I. S., 2002, Microbial cellulose utilization: Fundamentals and biotechnology, Microbiol. Mol. Biol. Reviews 66: 506-577). It is understood herein that any method known in the art comprising pretreatment, enzymatic hydrolysis (saccharification), fermentation, or a combination thereof, can be used in the practicing the methods of the present invention.

[0221] A conventional apparatus can include a fed-batch stirred reactor, a batch stirred reactor, a continuous flow stirred reactor with ultrafiltration, and/or a continuous plug-flow column reactor (Fernanda de Castilhos Corazza, Flávio Faria de Moraes, Gisella Maria Zanin and Ivo Neitzel, 2003, Optimal control in fed-batch reactor for the cellobiose hydrolysis, Acta Scientiarum. Technology 25: 33-38; Gusakov, A. V., and Sinitsyn, A. P., 1985, Kinetics of the enzymatic hydrolysis of cellulose: 1. A mathematical model for a batch reactor process, Enz. Microb. Technol. 7: 346-352), an attrition reactor (Ryu, S. K., and Lee, J. M., 1983, Bioconversion of waste cellulose by using an attrition bioreactor, Biotechnol. Bioeng. 25: 53-65), or a reactor with intensive stirring induced by an electromagnetic field (Gusakov, A. V., Sinitsyn, A. P., Davydkin, I. Y., Davydkin, V. Y., Protas, O. V., 1996, Enhancement of enzymatic cellulose hydrolysis using a novel type of bioreactor with intensive stirring induced by electromagnetic field, Appl. Biochem. Biotechnol. 56: 141-153). Additional reactor types include: fluidized bed, upflow blanket, immobilized, and extruder type reactors for hydrolysis and/or fermentation.

[0222] Pretreatment. In practicing the methods of the present invention, any pretreatment process known in the art can be used to disrupt plant cell wall components of the cellulosic material (Chandra et al., 2007, Substrate pretreatment: The key to effective enzymatic hydrolysis of lignocellulosics? Adv. Biochem. Engin./Biotechnol. 108: 67-93; Galbe and Zacchi, 2007, Pretreatment of lignocellulosic materials for efficient bioethanol production, Adv. Biochem. Engin./Biotechnol. 108: 41-65; Hendriks and Zeeman, 2009, Pretreatments to enhance the digestibility of lignocellulosic biomass, Bioresource Technol. 100: 10-18; Mosier et al., 2005, Features of promising technologies for pretreatment of lignocellulosic biomass, Bioresource Technol. 96: 673-686; Taherzadeh and Karimi, 2008, Pretreatment of lignocellulosic wastes to improve ethanol and biogas production: A review, Int. J. of Mol. Sci. 9: 1621-1651; Yang and Wyman, 2008, Pretreatment: the key to unlocking low-cost cellulosic ethanol, Biofuels Bioproducts and Biorefining-Biofpr. 2: 26-40).

[0223] The cellulosic material can also be subjected to particle size reduction, sieving, pre-soaking, wetting, washing, and/or conditioning prior to pretreatment using methods known in the art.

[0224] Conventional pretreatments include, but are not limited to, steam pretreatment (with or without explosion), dilute acid pretreatment, hot water pretreatment, alkaline pretreatment, lime pretreatment, wet oxidation, wet explosion, ammonia fiber explosion, organosolv pretreatment, and biological pretreatment. Additional pretreatments include ammonia percolation, ultrasound, electroporation, microwave, supercritical CO₂, supercritical H₂O, ozone, ionic liquid, and gamma irradiation pretreatments.

[0225] The cellulosic material can be pretreated before hydrolysis and/or fermentation. Pretreatment is preferably performed prior to the hydrolysis. Alternatively, the pretreatment can be carried out simultaneously with enzyme hydrolysis to release fermentable sugars, such as glucose, xylose, and/or cellobiose. In most cases the pretreatment step itself results in some conversion of biomass to fermentable sugars (even in absence of enzymes).

[0226] Steam Pretreatment. In steam pretreatment, the cellulosic material is heated to disrupt the plant cell wall components, including lignin, hemicellulose, and cellulose to make the cellulose and other fractions, e.g., hemicellulose, accessible to enzymes. The cellulosic material is passed to or through a reaction vessel where steam is injected to increase the temperature to the required temperature and pressure and is retained therein for the desired reaction time. Steam pretreatment is preferably performed at 140-250° C., e.g., 160-200° C. or 170-190° C., where the optimal temperature range depends on addition of a chemical catalyst. Residence time for the steam pretreatment is preferably 1-60 minutes, e.g., 1-30 minutes, 1-20 minutes, 3-12 minutes, or 4-10 minutes, where the optimal residence time depends on temperature range and addition of a chemical catalyst. Steam pretreatment allows for relatively high solids loadings, so that the cellulosic material is generally only moist during the pretreatment. The steam pretreatment is often combined with an explosive discharge of the material after the pretreatment, which is known as steam explosion, that is, rapid flashing to atmospheric pressure and turbulent flow of the material to increase the accessible surface area by fragmentation (Duff and Murray, 1996, Bioresource Technology 855: 1-33; Galbe and Zacchi, 2002, Appl. Microbiol. Biotechnol. 59: 618-628; U.S. Patent Application No. 20020164730). During steam pretreatment, hemicellulose acetyl groups are cleaved and the resulting acid autocatalyzes partial hydrolysis of the hemicellulose to monosaccharides and oligosaccharides. Lignin is removed to only a limited extent.

[0227] Chemical Pretreatment: The term “chemical treatment” refers to any chemical pretreatment that promotes the separation and/or release of cellulose, hemicellulose, and/or lignin. Such a pretreatment can convert crystalline cellulose to amorphous cellulose. Examples of suitable chemical pretreatment processes include, for example, dilute acid pretreatment, lime pretreatment, wet oxidation, ammonia fiber/freeze explosion (AFEX), ammonia percolation (APR), ionic liquid, and organosolv pretreatments.

[0228] A catalyst such as H₂SO₄ or SO₂ (typically 0.3 to 5% w/w) is often added prior to steam pretreatment, which decreases the time and temperature, increases the recovery, and improves enzymatic hydrolysis (Ballesteros et al., 2006, Appl. Biochem. Biotechnol. 129-132: 496-508; Varga et al., 2004, Appl. Biochem. Biotechnol. 113-116: 509-523; Sassner et al., 2006, Enzyme Microb. Technol. 39: 756-762). In dilute acid pretreatment, the cellulosic material is mixed with dilute acid, typically H₂SO₄, and water to form a slurry, heated by steam to the desired temperature, and after a residence time flashed to atmospheric pressure. The dilute acid pretreatment can be performed with a number of reactor designs, e.g., plug-flow reactors, counter-current reactors, or continuous counter-current shrinking bed reactors (Duff and Murray, 1996, supra; Schell et al., 2004, Bioresource Technol. 91: 179-188; Lee et al., 1999, Adv. Biochem. Eng. Biotechnol. 65: 93-115).

[0229] Several methods of pretreatment under alkaline conditions can also be used. These alkaline pretreatments include, but are not limited to, sodium hydroxide, lime, wet oxidation, ammonia percolation (APR), and ammonia fiber/freeze explosion (AFEX).

[0230] Lime pretreatment is performed with calcium oxide or calcium hydroxide at temperatures of 85-150° C. and residence times from 1 hour to several days (Wyman et al., 2005, Bioresource Technol. 96: 1959-1966; Mosier et al., 2005, Bioresource Technol. 96: 673-686). WO 2006/110891, WO 2006/110899, WO 2006/110900, and WO 2006/110901 disclose pretreatment methods using ammonia.

[0231] Wet oxidation is a thermal pretreatment performed typically at 180-200° C. for 5-15 minutes with addition of an oxidative agent such as hydrogen peroxide or over-pressure of oxygen (Schmidt and Thomsen, 1998, Bioresource Technol. 64: 139-151; Palonen et al., 2004, Appl. Biochem. Biotechnol. 117: 1-17; Varga et al., 2004, Biotechnol. Bioeng. 88: 567-574; Martin et al., 2006, J. Chem. Technol. Biotechnol. 81: 1669-1677). The pretreatment is performed preferably at 1-40% dry matter, e.g., 2-30% dry matter or 5-20% dry matter, and often the initial pH is increased by the addition of alkali such as sodium carbonate.

[0232] A modification of the wet oxidation pretreatment method, known as wet explosion (combination of wet oxidation and steam explosion), can handle dry matter up to 30%. In wet explosion, the oxidizing agent is introduced during pretreatment after a certain residence time. The pretreatment is then ended by flashing to atmospheric pressure (WO 2006/032282).

[0233] Ammonia fiber explosion (AFEX) involves treating the cellulosic material with liquid or gaseous ammonia at moderate temperatures such as 90-150° C. and high pressure such as 17-20 bar for 5-10 minutes, where the dry matter content can be as high as 60% (Gollapalli et al., 2002, Appl. Biochem. Biotechnol. 98: 23-35; Chundawat et al., 2007, Biotechnol. Bioeng. 96: 219-231; Alizadeh et al., 2005, Appl. Biochem. Biotechnol. 121: 1133-1141; Teymouri et al., 2005, Bioresource Technol. 96: 2014-2018). During AFEX pretreatment cellulose and hemicelluloses remain relatively intact. Lignin-carbohydrate complexes are cleaved.

[0234] Organosolv pretreatment delignifies the cellulosic material by extraction using aqueous ethanol (40-60% ethanol) at 160-200° C. for 30-60 minutes (Pan et al., 2005, Biotechnol. Bioeng. 90: 473-481; Pan et al., 2006, Biotechnol. Bioeng. 94: 851-861; Kurabi et al., 2005, Appl. Biochem. Biotechnol. 121: 219-230). Sulphuric acid is usually added as a catalyst. In organosolv pretreatment, the majority of hemicellulose and lignin is removed.

[0235] Other examples of suitable pretreatment methods are described by Schell et al., 2003, Appl. Biochem. and Biotechnol. Vol. 105-108, p. 69-85, and Mosier et al., 2005, Bioresource Technology 96: 673-686, and U.S. Published Application 2002/0164730.

[0236] In one aspect, the chemical pretreatment is preferably carried out as a dilute acid treatment, and more preferably as a continuous dilute acid treatment. The acid is typically sulfuric acid, but other acids can also be used, such as acetic acid, citric acid, nitric acid, phosphoric acid, tartaric acid, succinic acid, hydrogen chloride, or mixtures thereof. Mild acid treatment is conducted in the pH range of preferably 1-5, e.g., 1-4 or 1-2.5. In one aspect, the acid concentration is in the range from preferably 0.01 to 10 wt % acid, e.g., 0.05 to 5 wt % acid or 0.1 to 2 wt % acid. The acid is contacted with the cellulosic material and held at a temperature in the range of preferably 140-200° C., e.g., 165-190° C., for periods ranging from 1 to 60 minutes.

[0237] In another aspect, pretreatment takes place in an aqueous slurry. In preferred aspects, the cellulosic material is present during pretreatment in amounts preferably between 10-80 wt %, e.g., 20-70 wt % or 30-60 wt %, such as around 40 wt %. The pretreated cellulosic material can be unwashed or washed using any method known in the art, e.g., washed with water.

[0238] Mechanical Pretreatment or Physical Pretreatment: The term “mechanical pretreatment” or “physical pretreatment” refers to any pretreatment that promotes size reduction of particles. For example, such pretreatment can involve various types of grinding or milling (e.g., dry milling, wet milling, or vibratory ball milling).

[0239] The cellulosic material can be pretreated both physically (mechanically) and chemically. Mechanical or physical pretreatment can be coupled with steaming/steam explosion, hydrothermolysis, dilute or mild acid treatment, high temperature, high pressure treatment, irradiation (e.g., microwave irradiation), or combinations thereof. In one aspect, high pressure means pressure in the range of preferably about 100 to about 400 psi, e.g., about 150 to about 250 psi. In another aspect, high temperature means temperatures in the range of about 100 to about 300° C., e.g., about 140 to about 200° C. In a preferred aspect, mechanical or physical pretreatment is performed in a batch-process using a steam gun hydrolyzer system that uses high pressure and high temperature as defined above, e.g., a Sunds Hydrolyzer available from Sunds Defibrator AB, Sweden. The physical and chemical pretreatments can be carried out sequentially or simultaneously, as desired.

[0240] Accordingly, in a preferred aspect, the cellulosic material is subjected to physical (mechanical) or chemical pretreatment, or any combination thereof, to promote the separation and/or release of cellulose, hemicellulose, and/or lignin.

[0241] Biological Pretreatment: The term “biological pretreatment” refers to any biological pretreatment that promotes the separation and/or release of cellulose, hemicellulose, and/or lignin from the cellulosic material. Biological pretreatment techniques can involve applying lignin-solubilizing microorganisms and/or enzymes (see, for example, Hsu, T.-A., 1996, Pretreatment of biomass, in Handbook on Bioethanol: Production and Utilization, Wyman, C. E., ed., Taylor & Francis, Washington, D.C., 179-212; Ghosh and Singh, 1993, Physicochemical and biological treatments for enzymatic/microbial conversion of cellulosic biomass, Adv. Appl. Microbiol. 39: 295-333; McMillan, J. D., 1994, Pretreating lignocellulosic biomass: a review, in Enzymatic Conversion of Biomass for Fuels Production, Himmel, M. E., Baker, J. O., and Overend, R. P., eds., ACS Symposium Series 566, American Chemical Society, Washington, D.C., chapter 15; Gong, C. S., Cao, N. J., Du, J., and Tsao, G. T., 1999, Ethanol production from renewable resources, in Advances in Biochemical Engineering/Biotechnology, Scheper, T., ed., Springer-Verlag Berlin Heidelberg, Germany, 65: 207-241; Olsson and Hahn-Hagerdal, 1996, Fermentation of lignocellulosic hydrolysates for ethanol production, Enz. Microb. Tech. 18: 312-331; and Vallander and Eriksson, 1990, Production of ethanol from lignocellulosic materials: State of the art, Adv. Biochem. Eng./Biotechnol. 42: 63-95).

[0242] Saccharification.

[0243] In the hydrolysis step, also known as saccharification, the cellulosic material, e.g., pretreated, is hydrolyzed to break down cellulose and/or hemicellulose to fermentable sugars, such as glucose, cellobiose, xylose, xylulose, arabinose, mannose, galactose, and/or soluble oligosaccharides. The hydrolysis is performed enzymatically by an enzyme composition in the presence of a chitin binding protein or a chitin binding protein and a GH61 polypeptide. The enzymes of the compositions can be added simultaneously or sequentially.

[0244] Enzymatic hydrolysis is preferably carried out in a suitable aqueous environment under conditions that can be readily determined by one skilled in the art. In one aspect, hydrolysis is performed under conditions suitable for the activity of the enzyme(s), i.e., optimal for the enzyme(s). The hydrolysis can be carried out as a fed batch or continuous process where the cellulosic material is fed gradually to, for example, an enzyme containing hydrolysis solution.

[0245] The saccharification is generally performed in stirred-tank reactors or fermentors under controlled pH, temperature, and mixing conditions. Suitable process time, temperature and pH conditions can readily be determined by one skilled in the art. For example, the saccharification can last up to 200 hours, but is typically performed for preferably about 12 to about 120 hours, e.g., about 16 to about 72 hours or about 24 to about 48 hours. The temperature is in the range of preferably about 25° C. to about 70° C., e.g., about 30° C. to about 65° C., about 40° C. to about 60° C., or about 50° C. to about 55° C. The pH is in the range of preferably about 3 to about 8, e.g., about 3.5 to about 7, about 4 to about 6, or about 5.0 to about 5.5. The dry solids content is in the range of preferably about 5 to about 50 wt %, e.g., about 10 to about 40 wt % or about 20 to about 30 wt %.

[0246] The enzyme compositions can comprise any protein useful in degrading or converting the cellulosic material.

[0247] In one aspect, the enzyme composition comprises or further comprises one or more (e.g., several) proteins selected from the group consisting of a cellulase, a GH61 polypeptide having cellulolytic enhancing activity, a hemicellulase, an esterase, an expansin, a laccase, a ligninolytic enzyme, a pectinase, a peroxidase, a protease, and a swollenin. In another aspect, the cellulase is preferably one or more (e.g., several) enzymes selected from the group consisting of an endoglucanase, a cellobiohydrolase, and a beta-glucosidase. In another aspect, the hemicellulase is preferably one or more (e.g., several) enzymes selected from the group consisting of an acetylmannan esterase, an acetylxylan esterase, an arabinanase, an arabinofuranosidase, a coumaric acid esterase, a feruloyl esterase, a galactosidase, a glucuronidase, a glucuronoyl esterase, a mannanase, a mannosidase, a xylanase, and a xylosidase.

[0248] In another aspect, the enzyme composition comprises one or more (e.g., several) cellulolytic enzymes. In another aspect, the enzyme composition comprises or further comprises one or more (e.g., several) hemicellulolytic enzymes. In another aspect, the enzyme composition comprises one or more (e.g., several) cellulolytic enzymes and one or more (e.g., several) hemicellulolytic enzymes. In another aspect, the enzyme composition comprises one or more (e.g., several) enzymes selected from the group of cellulolytic enzymes and hemicellulolytic enzymes. In another aspect, the enzyme composition comprises an endoglucanase. In another aspect, the enzyme composition comprises a cellobiohydrolase. In another aspect, the enzyme composition comprises a beta-glucosidase. In another aspect, the enzyme composition comprises a GH61 polypeptide having cellulolytic enhancing activity. In another aspect, the enzyme composition comprises an endoglucanase and a GH61 polypeptide having cellulolytic enhancing activity. In another aspect, the enzyme composition comprises a cellobiohydrolase and a GH61 polypeptide having cellulolytic enhancing activity. In another aspect, the enzyme composition comprises a beta-glucosidase and a GH61 polypeptide having cellulolytic enhancing activity. In another aspect, the enzyme composition comprises an endoglucanase and a cellobiohydrolase. In another aspect, the enzyme composition comprises an endoglucanase and a beta-glucosidase. In another aspect, the enzyme composition comprises a cellobiohydrolase and a beta-glucosidase. In another aspect, the enzyme composition comprises an endoglucanase, a cellobiohydrolase, and a GH61 polypeptide having cellulolytic enhancing activity. In another aspect, the enzyme composition comprises an endoglucanase, a beta-glucosidase, and a GH61 polypeptide having cellulolytic enhancing activity. In another aspect, the enzyme composition comprises a cellobiohydrolase, a beta-glucosidase, and a GH61 polypeptide having cellulolytic enhancing activity. In another aspect, the enzyme composition comprises an endoglucanase, a cellobiohydrolase, and a beta-glucosidase. In another aspect, the enzyme composition comprises an endoglucanase, a cellobiohydrolase, a beta-glucosidase, and a GH61 polypeptide having cellulolytic enhancing activity.

[0249] In a preferred aspect, the enzyme composition comprises a GH61 polypeptide having cellulolytic enhancing activity or a GH61 polypeptide is added to the chitin binding protein, which synergizes with the chitin binding protein in the degradation or conversion of a cellulosic material.

[0250] In another aspect, the enzyme composition comprises an acetylmannan esterase. In another aspect, the enzyme composition comprises an acetylxylan esterase. In another aspect, the enzyme composition comprises an arabinanase (e.g., alpha-L-arabinanase). In another aspect, the enzyme composition comprises an arabinofuranosidase (e.g., alpha-L-arabinofuranosidase). In another aspect, the enzyme composition comprises a coumaric acid esterase. In another aspect, the enzyme composition comprises a feruloyl esterase. In another aspect, the enzyme composition comprises a galactosidase (e.g., alpha-galactosidase and/or beta-galactosidase). In another aspect, the enzyme composition comprises a glucuronidase (e.g., alpha-D-glucuronidase). In another aspect, the enzyme composition comprises a glucuronoyl esterase. In another aspect, the enzyme composition comprises a mannanase. In another aspect, the enzyme composition comprises a mannosidase (e.g., beta-mannosidase). In another aspect, the enzyme composition comprises a xylanase. In a preferred aspect, the xylanase is a Family 10 xylanase. In another aspect, the enzyme composition comprises a xylosidase (e.g., beta-xylosidase).

[0251] In another aspect, the enzyme composition comprises an esterase. In another aspect, the enzyme composition comprises an expansin. In another aspect, the enzyme composition comprises a laccase. In another aspect, the enzyme composition comprises a ligninolytic enzyme. In a preferred aspect, the ligninolytic enzyme is a manganese peroxidase. In another preferred aspect, the ligninolytic enzyme is a lignin peroxidase. In another preferred aspect, the ligninolytic enzyme is a H₂O₂-producing enzyme. In another aspect, the enzyme composition comprises a pectinase. In another aspect, the enzyme composition comprises a peroxidase. In another aspect, the enzyme composition comprises a protease. In another aspect, the enzyme composition comprises a swollenin.

[0252] In the methods of the present invention, the enzyme(s) can be added prior to or during saccharification, saccharification and fermentation, or fermentation.

[0253] One or more (e.g., several) components of the enzyme composition may be wild-type proteins, recombinant proteins, or a combination of wild-type proteins and recombinant proteins. For example, one or more (e.g., several) components may be native proteins of a cell, which is used as a host cell to express recombinantly one or more (e.g., several) other components of the enzyme composition. One or more (e.g., several) components of the enzyme composition may be produced as monocomponents, which are then combined to form the enzyme composition. The enzyme composition may be a combination of multicomponent and monocomponent protein preparations.

[0254] The enzymes used in the methods of the present invention may be in any form suitable for use, such as, for example, a fermentation broth formulation or a cell composition, a cell lysate with or without cellular debris, a semi-purified or purified enzyme preparation, or a host cell as a source of the enzymes. The enzyme composition may be a dry powder or granulate, a non-dusting granulate, a liquid, a stabilized liquid, or a stabilized protected enzyme. Liquid enzyme preparations may, for instance, be stabilized by adding stabilizers such as a sugar, a sugar alcohol or another polyol, and/or lactic acid or another organic acid according to established processes.

[0255] The optimum amounts of the enzymes and chitin binding proteins depend on several factors including, but not limited to, the mixture of component cellulolytic enzymes and/or hemicellulolytic enzymes, the cellulosic material, the concentration of cellulosic material, the pretreatment(s) of the cellulosic material, temperature, time, pH, and inclusion of fermenting organism (e.g., yeast for Simultaneous Saccharification and Fermentation).

[0256] In one aspect, an effective amount of cellulolytic or hemicellulolytic enzyme to the cellulosic material is about 0.5 to about 50 mg, e.g., about 0.5 to about 40 mg, about 0.5 to about 25 mg, about 0.75 to about 20 mg, about 0.75 to about 15 mg, about 1.0 to about 10 mg, about 1.5 to about 10 mg, or about 2.5 to about 10 mg per g of the cellulosic material.

[0257] In another aspect, an effective amount of a chitin binding protein to the cellulosic material is about 0.01 to about 50 mg, e.g., about 0.01 to about 40 mg, about 0.01 to about 30 mg, about 0.01 to about 20 mg, about 0.01 to about 10 mg, about 0.01 to about 5 mg, about 0.025 to about 1.5 mg, about 0.05 to about 1.25 mg, about 0.075 to about 1.25 mg, about 0.1 to about 1.25 mg, about 0.15 to about 1.25 mg, or about 0.25 to about 1.0 mg per g of the cellulosic material.

[0258] In another aspect, an effective amount of a GH61 polypeptide having cellulolytic enhancing activity to the cellulosic material is about 0.01 to about 50 mg, e.g., about 0.01 to about 40 mg, about 0.01 to about 30 mg, about 0.01 to about 20 mg, about 0.01 to about 10 mg, about 0.01 to about 5 mg, about 0.025 to about 1.5 mg, about 0.05 to about 1.25 mg, about 0.075 to about 1.25 mg, about 0.1 to about 1.25 mg, about 0.15 to about 1.25 mg, or about 0.25 to about 1.0 mg per g of the cellulosic material.

[0259] In another aspect, an effective amount of a chitin binding protein to cellulolytic enzyme is about 0.005 to about 1.0 g, e.g., about 0.01 to about 1.0 g, about 0.05 to about 0.75 g, about 0.05 to about 0.5 g, about 0.1 to about 0.5 g, about 0.1 to about 0.25 g, or about 0.05 to about 0.2 g per g of cellulolytic enzyme.

[0260] In another aspect, an effective amount of a GH61 polypeptide having cellulolytic enhancing activity to cellulolytic enzyme is about 0.005 to about 1.0 g, e.g., about 0.01 to about 1.0 g, about 0.05 to about 0.75 g, about 0.05 to about 0.5 g, about 0.1 to about 0.5 g, about 0.1 to about 0.25 g, or about 0.05 to about 0.2 g per g of cellulolytic enzyme.

[0261] In another aspect, an effective amount of a chitin binding protein to a GH61 polypeptide having cellulolytic enhancing activity is in a ratio (wt/wt) of about 0.01 to about 100, e.g., about 0.1 to about 10, about 0.2 to about 5, about 0.5 to about 2, or about 1 g per g of GH61 polypeptide having cellulolytic enhancing activity.

[0262] The polypeptides having cellulolytic enzyme activity or hemicellulolytic enzyme activity, as well as other proteins/polypeptides, e.g., GH61 polypeptide having cellulolytic enhancing activity, useful in the degradation of the cellulosic material (hereinafter “polypeptides having enzyme activity”) can be derived or obtained from any suitable origin, including, bacterial, fungal, yeast, plant, or mammalian origin. The term “obtained” also means herein that the enzyme may have been produced recombinantly in a host organism employing methods described herein, wherein the recombinantly produced enzyme is either native or foreign to the host organism or has a modified amino acid sequence, e.g., having one or more (e.g., several) amino acids that are deleted, inserted and/or substituted, i.e., a recombinantly produced enzyme that is a mutant and/or a fragment of a native amino acid sequence or an enzyme produced by nucleic acid shuffling processes known in the art. Encompassed within the meaning of a native enzyme are natural variants and within the meaning of a foreign enzyme are variants obtained recombinantly, such as by site-directed mutagenesis or shuffling.

[0263] A polypeptide having enzyme activity may be a bacterial polypeptide. For example, the polypeptide may be a Gram positive bacterial polypeptide such as a Bacillus, Streptococcus, Streptomyces, Staphylococcus, Enterococcus, Lactobacillus, Lactococcus, Clostridium, Geobacillus, Caldicellulosiruptor, Acidothermus, Thermobifidia, or Oceanobacillus polypeptide having enzyme activity, or a Gram negative bacterial polypeptide such as an E. coli, Pseudomonas, Salmonella, Campylobacter, Helicobacter, Flavobacterium, Fusobacterium, Ilyobacter, Neisseria, or Ureaplasma polypeptide having enzyme activity.

[0264] In one aspect, the polypeptide is a Bacillus alkalophilus, Bacillus amyloliquefaciens, Bacillus brevis, Bacillus circulans, Bacillus clausii, Bacillus coagulans, Bacillus firmus, Bacillus lautus, Bacillus lentus, Bacillus licheniformis, Bacillus megaterium, Bacillus pumilus, Bacillus stearothermophilus, Bacillus subtilis, or Bacillus thuringiensis polypeptide having enzyme activity.

[0265] In another aspect, the polypeptide is a Streptococcus equisimilis, Streptococcus pyogenes, Streptococcus uberis, or Streptococcus equi subsp. Zooepidemicus polypeptide having enzyme activity.

[0266] In another aspect, the polypeptide is a Streptomyces achromogenes, Streptomyces avermitilis, Streptomyces coelicolor, Streptomyces griseus, or Streptomyces lividans polypeptide having enzyme activity.

[0267] The polypeptide having enzyme activity may also be a fungal polypeptide, and more preferably a yeast polypeptide such as a Candida, Kluyveromyces, Pichia, Saccharomyces, Schizosaccharomyces, or Yarrowia polypeptide having enzyme activity; or more preferably a filamentous fungal polypeptide such as an Acremonium, Agaricus, Alternaria, Aspergillus, Aureobasidium, Botryospaeria, Ceriporiopsis, Chaetomidium, Chrysosporium, Claviceps, Cochliobolus, Coprinopsis, Coptotermes, Corynascus, Cryphonectria, Cryptococcus, Diplodia, Exidia, Filibasidium, Fusarium, Gibberella, Holomastigotoides, Humicola, Irpex, Lentinula, Leptospaeria, Magnaporthe, Melanocarpus, Meripilus, Mucor, Myceliophthora, Neocallimastix, Neurospora, Paecilomyces, Penicillium, Phanerochaete, Piromyces, Poitrasia, Pseudoplectania, Pseudotrichonympha, Rhizomucor, Schizophyllum, Scytalidium, Talaromyces, Thermoascus, Thielavia, Tolypocladium, Trichoderma, Trichophaea, Verticillium, Volvariella, or Xylaria polypeptide having enzyme activity.

[0268] In one aspect, the polypeptide is a Saccharomyces carlsbergensis, Saccharomyces cerevisiae, Saccharomyces diastaticus, Saccharomyces douglasii, Saccharomyces kluyveri, Saccharomyces norbensis, or Saccharomyces oviformis polypeptide having enzyme activity.

[0269] In another aspect, the polypeptide is an Acremonium cellulolyticus, Aspergillus aculeatus, Aspergillus awamori, Aspergillus fumigatus, Aspergillus foetidus, Aspergillus japonicus, Aspergillus nidulans, Aspergillus niger, Aspergillus oryzae, Chrysosporium keratinophilum, Chrysosporium lucknowense, Chrysosporium tropicum, Chrysosporium merdarium, Chrysosporium inops, Chrysosporium pannicola, Chrysosporium queenslandicum, Chrysosporium zonatum, Fusarium bactridioides, Fusarium cerealis, Fusarium crookwellense, Fusarium culmorum, Fusarium graminearum, Fusarium graminum, Fusarium heterosporum, Fusarium negundi, Fusarium oxysporum, Fusarium reticulatum, Fusarium roseum, Fusarium sambucinum, Fusarium sarcochroum, Fusarium sporotrichioides, Fusarium sulphureum, Fusarium torulosum, Fusarium trichothecioides, Fusarium venenatum, Humicola grisea, Humicola insolens, Humicola lanuginosa, Irpex lacteus, Mucor miehei, Myceliophthora thermophila, Neurospora crassa, Penicillium funiculosum, Penicillium purpurogenum, Phanerochaete chrysosporium, Thielavia achromatica, Thielavia albomyces, Thielavia albopilosa, Thielavia australeinsis, Thielavia fimeti, Thielavia microspora, Thielavia ovispora, Thielavia peruviana, Thielavia spededonium, Thielavia setosa, Thielavia subthermophila, Thielavia terrestris, Trichoderma harzianum, Trichoderma koningii, Trichoderma longibrachiatum, Trichoderma reesei, Trichoderma viride, or Trichophaea saccata polypeptide having enzyme activity.

[0270] Chemically modified or protein engineered mutants of polypeptides having enzyme activity may also be used.

[0271] One or more (e.g., several) components of the enzyme composition may be a recombinant component, i.e., produced by cloning of a DNA sequence encoding the single component and subsequent cell transformed with the DNA sequence and expressed in a host (see, for example, WO 91/17243 and WO 91/17244). The host is preferably a heterologous host (enzyme is foreign to host), but the host may under certain conditions also be a homologous host (enzyme is native to host). Monocomponent cellulolytic proteins may also be prepared by purifying such a protein from a fermentation broth.

[0272] In one aspect, the one or more (e.g., several) cellulolytic enzymes comprise a commercial cellulolytic enzyme preparation. Examples of commercial cellulolytic enzyme preparations suitable for use in the present invention include, for example, CELLIC® CTec (Novozymes A/S), CELLIC® CTec2 (Novozymes A/S), CELLIC® CTec3 (Novozymes A/S), CELLUCLAST™ (Novozymes A/S), NOVOZYM™ 188 (Novozymes A/S), CELLUZYME™ (Novozymes A/S), CEREFLO™ (Novozymes A/S), and ULTRAFLO™ (Novozymes A/S), ACCELERASE™ (Genencor Int.), LAMINEX™ (Genencor Int.), SPEZYME™ CP (Genencor Int.), FILTRASE® NL (DSM); METHAPLUS® S/L 100 (DSM), ROHAMENT™ 7069 W (Röhm GmbH), FIBREZYME® LDI (Dyadic International, Inc.), FIBREZYME® LBR (Dyadic International, Inc.), or VISCOSTAR® 150 L (Dyadic International, Inc.). The cellulase enzymes are added in amounts effective from about 0.001 to about 5.0 wt % of solids, e.g., about 0.025 to about 4.0 wt % of solids or about 0.005 to about 2.0 wt % of solids.

[0273] In the enzyme compositions of the present invention, any GH61 polypeptide having cellulolytic enhancing activity can be used.

[0274] In a first aspect, isolated polypeptides having cellulolytic enhancing activity, comprise the following motifs:

[0275] [ILMV]-P—X(4,5)-G-X—Y—[ILMV]-X—R—X-[EQ]-X(4)-[HNQ] (SEQ ID NO: 181 or SEQ ID NO: 182) and [FW]-[TF]-K-[AIV],

wherein X is any amino acid, X(4,5) is any amino acid at 4 or 5 contiguous positions, and X(4) is any amino acid at 4 contiguous positions.

[0276] The isolated polypeptide comprising the above-noted motifs may further comprise:

[0277] H—X(1,2)-G-P—X(3)-[YW]-[AILMV] (SEQ ID NO: 183 or SEQ ID NO: 184),

[0278] [EQ]-X—Y—X(2)-C—X-[EHQN]-[FILV]-X—[ILV] (SEQ ID NO: 185), or

[0279] H—X(1,2)-G-P—X(3)-[YW]-[AILMV] (SEQ ID NO: 186 or SEQ ID NO: 187) and [EQ]-X—Y—X(2)-C—X-[EHQN]-[FILV]-X—[ILV] (SEQ ID NO: 188),

wherein X is any amino acid, X(1,2) is any amino acid at 1 position or 2 contiguous positions, X(3) is any amino acid at 3 contiguous positions, and X(2) is any amino acid at 2 contiguous positions. In the above motifs, the accepted IUPAC single letter amino acid abbreviation is employed.

[0280] In a preferred embodiment, the isolated GH61 polypeptide having cellulolytic enhancing activity further comprises H—X(1,2)-G-P—X(3)-[YW]-[AILMV] (SEQ ID NO: 183 or SEQ ID NO: 184). In another preferred embodiment, the isolated GH61 polypeptide having cellulolytic enhancing activity further comprises [EQ]X—Y—X(2)-C—X-[EHQN]-[FILV]-X—[ILV] (SEQ ID NO: 185). In another preferred embodiment, the isolated GH61 polypeptide having cellulolytic enhancing activity further comprises H—X(1,2)-G-P—X(3)-[YW]-[AILMV] (SEQ ID NO: 186 or SEQ ID NO: 187) and [EQ]-X—Y—X(2)-C—X-[EHQN]-[FILV]-X—[ILV] (SEQ ID NO: 188).

[0281] In a second aspect, isolated polypeptides having cellulolytic enhancing activity, comprise the following motif:

[0282] [ILMV]-P—X(4,5)-G-X—Y—[ILMV]-X—R—X-[EQ]-X(3)-A-[HNQ] (SEQ ID NO: 189 or SEQ ID NO: 190),

[0283] wherein X is any amino acid, X(4,5) is any amino acid at 4 or 5 contiguous positions, and X(3) is any amino acid at 3 contiguous positions. In the above motif, the accepted IUPAC single letter amino acid abbreviation is employed.

[0284] In a third aspect, the GH61 polypeptide having cellulolytic enhancing activity comprises or consists of an amino acid sequence having at least 60%, e.g., at least 65%, at least 70%, at least 75%, at least 80%, at least 81%, at least 82%, at least 83%, at least 84%, at least 85%, at least 86%, at least 87%, at least 88%, at least 89%, at least 90%, at least 91%, at least 92%, at least 93%, at least 94%, or at least 95%, at least 96%, at least 97%, at least 98%, at least 99%, or at least 100% sequence identity to the mature polypeptide of SEQ ID NO: 192, SEQ ID NO: 194, SEQ ID NO: 196, SEQ ID NO: 198, SEQ ID NO: 200, SEQ ID NO: 202, SEQ ID NO: 204, SEQ ID NO: 206, SEQ ID NO: 208, SEQ ID NO: 210, SEQ ID NO: 212, SEQ ID NO: 214, SEQ ID NO: 216, SEQ ID NO: 218, SEQ ID NO: 220, SEQ ID NO: 222, SEQ ID NO: 224, SEQ ID NO: 226, SEQ ID NO: 228, SEQ ID NO: 230, SEQ ID NO: 232, SEQ ID NO: 234, SEQ ID NO: 236, SEQ ID NO: 238, SEQ ID NO: 240, SEQ ID NO: 242, SEQ ID NO: 244, SEQ ID NO: 246, SEQ ID NO: 248, SEQ ID NO: 250, SEQ ID NO: 252, SEQ ID NO: 254, SEQ ID NO: 256, SEQ ID NO: 258, SEQ ID NO: 260, SEQ ID NO: 262, SEQ ID NO: 264, SEQ ID NO: 266, SEQ ID NO: 268, SEQ ID NO: 270, SEQ ID NO: 272, SEQ ID NO: 274, SEQ ID NO: 276, SEQ ID NO: 278, or SEQ ID NO: 280.

[0285] In a fourth aspect, the GH61 polypeptide having cellulolytic enhancing activity is encoded by a polynucleotide that hybridizes under at least very low stringency conditions, e.g., at least low stringency conditions, at least medium stringency conditions, at least medium-high stringency conditions, at least high stringency conditions, or at least very high stringency conditions with (i) the mature polypeptide coding sequence of SEQ ID NO: 191, SEQ ID NO: 193, SEQ ID NO: 195, SEQ ID NO: 197, SEQ ID NO: 199, SEQ ID NO: 201, SEQ ID NO: 203, SEQ ID NO: 205, SEQ ID NO: 207, SEQ ID NO: 209, SEQ ID NO: 211, SEQ ID NO: 213, SEQ ID NO: 215, SEQ ID NO: 217, SEQ ID NO: 219, SEQ ID NO: 221, SEQ ID NO: 223, SEQ ID NO: 225, SEQ ID NO: 227, SEQ ID NO: 229, SEQ ID NO: 231, SEQ ID NO: 233, SEQ ID NO: 235, SEQ ID NO: 237, SEQ ID NO: 239, SEQ ID NO: 241, SEQ ID NO: 243, SEQ ID NO: 245, SEQ ID NO: 247, SEQ ID NO: 249, SEQ ID NO: 251, SEQ ID NO: 253, SEQ ID NO: 255, SEQ ID NO: 257, SEQ ID NO: 259, SEQ ID NO: 261, SEQ ID NO: 263, SEQ ID NO: 265, SEQ ID NO: 267, SEQ ID NO: 269, SEQ ID NO: 271, SEQ ID NO: 273, SEQ ID NO: 275, SEQ ID NO: 277, or SEQ ID NO: 279, (ii) the genomic DNA sequence of the mature polypeptide coding sequence of SEQ ID NO: 197, SEQ ID NO: 199, SEQ ID NO: 201, SEQ ID NO: 205, SEQ ID NO: 271, SEQ ID NO: 273, or SEQ ID NO: 275, or the cDNA sequence of the mature polypeptide coding sequence of SEQ ID NO: 191, SEQ ID NO: 193, SEQ ID NO: 195, SEQ ID NO: 203, SEQ ID NO: 207, SEQ ID NO: 209, SEQ ID NO: 211, SEQ ID NO: 213, SEQ ID NO: 215, SEQ ID NO: 217, SEQ ID NO: 219, SEQ ID NO: 221, SEQ ID NO: 223, SEQ ID NO: 225, SEQ ID NO: 227, SEQ ID NO: 229, SEQ ID NO: 231, SEQ ID NO: 233, SEQ ID NO: 235, SEQ ID NO: 237, SEQ ID NO: 239, SEQ ID NO: 241, SEQ ID NO: 243, SEQ ID NO: 245, SEQ ID NO: 247, SEQ ID NO: 249, SEQ ID NO: 251, SEQ ID NO: 253, SEQ ID NO: 255, SEQ ID NO: 257, SEQ ID NO: 259, SEQ ID NO: 261, SEQ ID NO: 263, SEQ ID NO: 265, SEQ ID NO: 267, SEQ ID NO: 269, SEQ ID NO: 277, or SEQ ID NO: 279, or (iii) a full-length complement of (i) or (ii) (J. Sambrook, E. F. Fritsch, and T. Maniatus, 1989, supra).

[0286] In a fifth aspect, the GH61 polypeptide having cellulolytic enhancing activity is encoded by a polynucleotide comprising or consisting of a nucleotide sequence having at least 60%, e.g., at least 65%, at least 70%, at least 75%, at least 80%, at least 81%, at least 82%, at least 83%, at least 84%, at least 85%, at least 86%, at least 87%, at least 88%, at least 89%, at least 90%, at least 91%, at least 92%, at least 93%, at least 94%, at least 95%, at least 96%, at least 97%, at least 98%, at least 99%, or 100% sequence identity to the mature polypeptide coding sequence of SEQ ID NO: 191, SEQ ID NO: 193, SEQ ID NO: 195, SEQ ID NO: 197, SEQ ID NO: 199, SEQ ID NO: 201, SEQ ID NO: 203, SEQ ID NO: 205, SEQ ID NO: 207, SEQ ID NO: 209, SEQ ID NO: 211, SEQ ID NO: 213, SEQ ID NO: 215, SEQ ID NO: 217, SEQ ID NO: 219, SEQ ID NO: 221, SEQ ID NO: 223, SEQ ID NO: 225, SEQ ID NO: 227, SEQ ID NO: 229, SEQ ID NO: 231, SEQ ID NO: 233, SEQ ID NO: 235, SEQ ID NO: 237, SEQ ID NO: 239, SEQ ID NO: 241, SEQ ID NO: 243, SEQ ID NO: 245, SEQ ID NO: 247, SEQ ID NO: 249, SEQ ID NO: 251, SEQ ID NO: 253, SEQ ID NO: 255, SEQ ID NO: 257, SEQ ID NO: 259, SEQ ID NO: 261, SEQ ID NO: 263, SEQ ID NO: 265, SEQ ID NO: 267, SEQ ID NO: 269, SEQ ID NO: 271, SEQ ID NO: 273, SEQ ID NO: 275, SEQ ID NO: 277, or SEQ ID NO: 279.

[0287] In a sixth aspect, the GH61 polypeptide having cellulolytic enhancing activity is a variant of the mature polypeptide of SEQ ID NO: 192, SEQ ID NO: 194, SEQ ID NO: 196, SEQ ID NO: 198, SEQ ID NO: 200, SEQ ID NO: 202, SEQ ID NO: 204, SEQ ID NO: 206, SEQ ID NO: 208, SEQ ID NO: 210, SEQ ID NO: 212, SEQ ID NO: 214, SEQ ID NO: 216, SEQ ID NO: 218, SEQ ID NO: 220, SEQ ID NO: 222, SEQ ID NO: 224, SEQ ID NO: 226, SEQ ID NO: 228, SEQ ID NO: 230, SEQ ID NO: 232, SEQ ID NO: 234, SEQ ID NO: 236, SEQ ID NO: 238, SEQ ID NO: 240, SEQ ID NO: 242, SEQ ID NO: 244, SEQ ID NO: 246, SEQ ID NO: 248, SEQ ID NO: 250, SEQ ID NO: 252, SEQ ID NO: 254, SEQ ID NO: 256, SEQ ID NO: 258, SEQ ID NO: 260, SEQ ID NO: 262, SEQ ID NO: 264, SEQ ID NO: 266, SEQ ID NO: 268, SEQ ID NO: 270, SEQ ID NO: 272, SEQ ID NO: 274, SEQ ID NO: 276, SEQ ID NO: 278, or SEQ ID NO: 280 comprising a substitution, deletion, and/or insertion at one or more (e.g., several) positions.

[0288] Preferably, amino acid changes are of a minor nature, that is conservative amino acid substitutions or insertions that do not significantly affect the folding and/or activity of the protein; small deletions, typically of one to about 30 amino acids; small amino- or carboxyl-terminal extensions, such as an amino-terminal methionine residue; a small linker peptide of up to about 20-25 residues; or a small extension that facilitates purification by changing net charge or another function, such as a poly-histidine tract, an antigenic epitope or a binding domain.

[0289] Examples of conservative substitutions are within the group of basic amino acids (arginine, lysine and histidine), acidic amino acids (glutamic acid and aspartic acid), polar amino acids (glutamine and asparagine), hydrophobic amino acids (leucine, isoleucine and valine), aromatic amino acids (phenylalanine, tryptophan and tyrosine), and small amino acids (glycine, alanine, serine, threonine and methionine). Amino acid substitutions that do not generally alter specific activity are known in the art and are described, for example, by H. Neurath and R. L. Hill, 1979, In, The Proteins, Academic Press, New York. The most commonly occurring exchanges are Ala/Ser, Val/Ile, Asp/Glu, Thr/Ser, Ala/Gly, Ala/Thr, Ser/Asn, Ala/Val, Ser/Gly, Tyr/Phe, Ala/Pro, Lys/Arg, Asp/Asn, Leu/Ile, Leu/Val, Ala/Glu, and Asp/Gly.

[0290] Alternatively, the amino acid changes are of such a nature that the physico-chemical properties of the polypeptides are altered. For example, amino acid changes may improve the thermal stability of the polypeptide, alter the substrate specificity, change the pH optimum, and the like.

[0291] Essential amino acids in a parent polypeptide can be identified according to procedures known in the art, such as site-directed mutagenesis or alanine-scanning mutagenesis (Cunningham and Wells, 1989, Science 244: 1081-1085). In the latter technique, single alanine mutations are introduced at every residue in the molecule, and the resultant mutant molecules are tested for cellulolytic enhancing activity to identify amino acid residues that are critical to the activity of the molecule. See also, Hilton et al., 1996, J. Biol. Chem. 271: 4699-4708. The active site of the enzyme or other biological interaction can also be determined by physical analysis of structure, as determined by such techniques as nuclear magnetic resonance, crystallography, electron diffraction, or photoaffinity labeling, in conjunction with mutation of putative contact site amino acids. See, for example, de Vos et al., 1992, Science 255: 306-312; Smith et al., 1992, J. Mol. Biol. 224: 899-904; Wlodaver et al., 1992, FEBS Lett. 309: 59-64. The identities of essential amino acids can also be inferred from analysis of identities with polypeptides that are related to the parent polypeptide.

[0292] Single or multiple amino acid substitutions, deletions, and/or insertions can be made and tested using known methods of mutagenesis, recombination, and/or shuffling, followed by a relevant screening procedure, such as those disclosed by Reidhaar-Olson and Sauer, 1988, Science 241: 53-57; Bowie and Sauer, 1989, Proc. Natl. Acad. Sci. USA 86: 2152-2156; WO 95/17413; or WO 95/22625. Other methods that can be used include error-prone PCR, phage display (e.g., Lowman et al., 1991, Biochemistry 30: 10832-10837; U.S. Pat. No. 5,223,409; WO 92/06204), and region-directed mutagenesis (Derbyshire et al., 1986, Gene 46: 145; Ner et al., 1988, DNA 7: 127).

[0293] Mutagenesis/shuffling methods can be combined with high-throughput, automated screening methods to detect activity of cloned, mutagenized polypeptides expressed by host cells (Ness et al., 1999, Nature Biotechnology 17: 893-896). Mutagenized DNA molecules that encode active polypeptides can be recovered from the host cells and rapidly sequenced using standard methods in the art. These methods allow the rapid determination of the importance of individual amino acid residues in a polypeptide.

[0294] The total number of amino acid substitutions, deletions and/or insertions of the mature polypeptide of SEQ ID NO: 192, SEQ ID NO: 194, SEQ ID NO: 196, SEQ ID NO: 198, SEQ ID NO: 200, SEQ ID NO: 202, SEQ ID NO: 204, SEQ ID NO: 206, SEQ ID NO: 208, SEQ ID NO: 210, SEQ ID NO: 212, SEQ ID NO: 214, SEQ ID NO: 216, SEQ ID NO: 218, SEQ ID NO: 220, SEQ ID NO: 222, SEQ ID NO: 224, SEQ ID NO: 226, SEQ ID NO: 228, SEQ ID NO: 230, SEQ ID NO: 232, SEQ ID NO: 234, SEQ ID NO: 236, SEQ ID NO: 238, SEQ ID NO: 240, SEQ ID NO: 242, SEQ ID NO: 244, SEQ ID NO: 246, SEQ ID NO: 248, SEQ ID NO: 250, SEQ ID NO: 252, SEQ ID NO: 254, SEQ ID NO: 256, SEQ ID NO: 258, SEQ ID NO: 260, SEQ ID NO: 262, SEQ ID NO: 264, SEQ ID NO: 266, SEQ ID NO: 268, SEQ ID NO: 270, SEQ ID NO: 272, SEQ ID NO: 274, SEQ ID NO: 276, SEQ ID NO: 278, or SEQ ID NO: 280, is up to 10, e.g., 1, 2, 3, 4, 5, 6, 7, 8, 9, or 10.

[0295] In an embodiment, the mature polypeptide comprises or consists of amino acids 20 to 326 of SEQ ID NO: 192, amino acids 18 to 239 of SEQ ID NO: 194, amino acids 20 to 258 of SEQ ID NO: 196, amino acids 19 to 226 of SEQ ID NO: 198, amino acids 20 to 304 of SEQ ID NO: 200, amino acids 16 to 317 of SEQ ID NO: 202, amino acids 22 to 249 of SEQ ID NO: 204, amino acids 20 to 249 of SEQ ID NO: 206, amino acids 18 to 232 of SEQ ID NO: 208, amino acids 16 to 235 of SEQ ID NO: 210, amino acids 19 to 323 of SEQ ID NO: 212, amino acids 16 to 310 of SEQ ID NO: 214, amino acids 20 to 246 of SEQ ID NO: 216, amino acids 22 to 354 of SEQ ID NO: 218, amino acids 22 to 250 of SEQ ID NO: 220, amino acids 22 to 322 of SEQ ID NO: 222, amino acids 24 to 444 of SEQ ID NO: 224, amino acids 26 to 253 of SEQ ID NO: 226, amino acids 18 to 246 of SEQ ID NO: 228, amino acids 20 to 334 of SEQ ID NO: 230, amino acids 18 to 227 of SEQ ID NO: 232, amino acids 20 to 223 of SEQ ID NO: 234, amino acids 22 to 368 of SEQ ID NO: 236, amino acids 25 to 330 of SEQ ID NO: 238, amino acids 17 to 236 of SEQ ID NO: 240, amino acids 19 to 250 of SEQ ID NO: 242, amino acids 23 to 478 of SEQ ID NO: 244, amino acids 17 to 230 of SEQ ID NO: 246, amino acids 20 to 257 of SEQ ID NO: 248, amino acids 23 to 251 of SEQ ID NO: 250, amino acids 19 to 349 of SEQ ID NO: 252, amino acids 24 to 436 of SEQ ID NO: 254, amino acids 21 to 344 of SEQ ID NO: 256, amino acids 26 to 400 of SEQ ID NO: 258, amino acids 21 to 389 of SEQ ID NO: 260, amino acids 22 to 406 of SEQ ID NO: 262, amino acids 20 to 427 of SEQ ID NO: 264, amino acids 18 to 267 of SEQ ID NO: 266, amino acids 21 to 273 of SEQ ID NO: 268, amino acids 21 to 322 of SEQ ID NO: 270, amino acids 18 to 234 of SEQ ID NO: 272, amino acids 24 to 233 of SEQ ID NO: 274, amino acids 17 to 237 of SEQ ID NO: 276, amino acids 20 to 484 of SEQ ID NO: 278, or amino acids 22 to 320 of SEQ ID NO: 280.

[0296] In another embodiment, the mature polypeptide coding sequence comprises or consists of is nucleotides 388 to 1332 of SEQ ID NO: 191 or the cDNA sequence thereof, nucleotides 98 to 821 of SEQ ID NO: 193 or the cDNA sequence thereof, nucleotides 126 to 978 of SEQ ID NO: 195 or the cDNA sequence thereof, nucleotides 55 to 678 of SEQ ID NO: 197 or the genomic DNA sequence thereof, nucleotides 58 to 912 of SEQ ID NO: 199 or the genomic DNA sequence thereof, nucleotides 46 to 951 of SEQ ID NO: 201 or the genomic DNA sequence thereof, nucleotides 64 to 796 of SEQ ID NO: 203 or the cDNA sequence thereof, nucleotides 77 to 766 of SEQ ID NO: 205 or the genomic DNA sequence thereof, nucleotides 52 to 921 of SEQ ID NO: 207 or the cDNA sequence thereof, nucleotides 46 to 851 of SEQ ID NO: 209 or the cDNA sequence thereof, nucleotides 55 to 1239 of SEQ ID NO: 211 or the cDNA sequence thereof, nucleotides 46 to 1250 of SEQ ID NO: 213 or the cDNA sequence thereof, nucleotides 58 to 811 of SEQ ID NO: 215 or the cDNA sequence thereof, nucleotides 64 to 1112 of SEQ ID NO: 217 or the cDNA sequence thereof, nucleotides 64 to 859 of SEQ ID NO: 219 or the cDNA sequence thereof, nucleotides 64 to 1018 of SEQ ID NO: 221 or the cDNA sequence thereof, nucleotides 70 to 1483 of SEQ ID NO: 223 or the cDNA sequence thereof, nucleotides 76 to 832 of SEQ ID NO: 225 or the cDNA sequence thereof, nucleotides 52 to 875 of SEQ ID NO: 227 or the cDNA sequence thereof, nucleotides 58 to 1250 of SEQ ID NO: 229 or the cDNA sequence thereof, nucleotides 52 to 795 of SEQ ID NO: 231 or the cDNA sequence thereof, nucleotides 58 to 974 of SEQ ID NO: 233 or the cDNA sequence thereof, nucleotides 64 to 1104 of SEQ ID NO: 235 or the cDNA sequence thereof, nucleotides 73 to 990 of SEQ ID NO: 237 or the cDNA sequence thereof, nucleotides 49 to 1218 of SEQ ID NO: 239 or the cDNA sequence thereof, nucleotides 55 to 930 of SEQ ID NO: 241 or the cDNA sequence thereof, nucleotides 67 to 1581 of SEQ ID NO: 243 or the cDNA sequence thereof, nucleotides 49 to 865 of SEQ ID NO: 245 or the cDNA sequence thereof, nucleotides 58 to 1065 of SEQ ID NO: 247 or the cDNA sequence thereof, nucleotides 67 to 868 of SEQ ID NO: 249 or the cDNA sequence thereof, nucleotides 55 to 1099 of SEQ ID NO: 251 or the cDNA sequence thereof, nucleotides 70 to 1483 of SEQ ID NO: 253 or the cDNA sequence thereof, nucleotides 61 to 1032 of SEQ ID NO: 255 or the cDNA sequence thereof, nucleotides 76 to 1200 of SEQ ID NO: 257 or the cDNA sequence thereof, nucleotides 61 to 1167 of SEQ ID NO: 259 or the cDNA sequence thereof, nucleotides 64 to 1218 of SEQ ID NO: 261 or the cDNA sequence thereof, nucleotides 58 to 1281 of SEQ ID NO: 263 or the cDNA sequence thereof, nucleotides 52 to 801 of SEQ ID NO: 265 or the cDNA sequence thereof, nucleotides 61 to 819 of SEQ ID NO: 267 or the cDNA sequence thereof, nucleotides 61 to 966 of SEQ ID NO: 269 or the cDNA sequence thereof, nucleotides 52 to 702 of SEQ ID NO: 271 or the genomic DNA sequence thereof, nucleotides 70 to 699 of SEQ ID NO: 273 or the genomic DNA sequence thereof, nucleotides 49 to 711 of SEQ ID NO: 275 or the genomic DNA sequence thereof, nucleotides 76 to 1452 of SEQ ID NO: 277 or the cDNA sequence thereof, or nucleotides 64 to 1018 of SEQ ID NO: 279 or the cDNA sequence thereof.

[0297] In the methods of the present invention, a GH61 polypeptide having cellulolytic enhancing activity of the present invention is used in the presence of a soluble activating divalent metal cation according to WO 2008/151043, e.g., manganese sulfate.

[0298] In another aspect, the GH61 polypeptide having cellulolytic enhancing activity is used in the presence of a dioxy compound, a bicylic compound, a heterocyclic compound, a nitrogen-containing compound, a quinone compound, a sulfur-containing compound, or a liquor obtained from a pretreated cellulosic material such as pretreated corn stover (PCS).

[0299] The dioxy compound may include any suitable compound containing two or more oxygen atoms. In some aspects, the dioxy compounds contain a substituted aryl moiety as described herein. The dioxy compounds may comprise one or more (e.g., several) hydroxyl and/or hydroxyl derivatives, but also include substituted aryl moieties lacking hydroxyl and hydroxyl derivatives. Non-limiting examples of the dioxy compounds include pyrocatechol or catechol; caffeic acid; 3,4-dihydroxybenzoic acid; 4-tert-butyl-5-methoxy-1,2-benzenediol; pyrogallol; gallic acid; methyl-3,4,5-trihydroxybenzoate; 2,3,4-trihydroxybenzophenone; 2,6-dimethoxyphenol; sinapinic acid; 3,5-dihydroxybenzoic acid; 4-chloro-1,2-benzenediol; 4-nitro-1,2-benzenediol; tannic acid; ethyl gallate; methyl glycolate; dihydroxyfumaric acid; 2-butyne-1,4-diol; (croconic acid; 1,3-propanediol; tartaric acid; 2,4-pentanediol; 3-ethyoxy-1,2-propanediol; 2,4,4′-trihydroxybenzophenone; cis-2-butene-1,4-diol; 3,4-dihydroxy-3-cyclobutene-1,2-dione; dihydroxyacetone; acrolein acetal; methyl-4-hydroxybenzoate; 4-hydroxybenzoic acid; and methyl-3,5-dimethoxy-4-hydroxybenzoate; or a salt or solvate thereof.

[0300] The bicyclic compound may include any suitable substituted fused ring system as described herein. The compounds may comprise one or more (e.g., several) additional rings, and are not limited to a specific number of rings unless otherwise stated. In one aspect, the bicyclic compound is a flavonoid. In another aspect, the bicyclic compound is an optionally substituted isoflavonoid. In another aspect, the bicyclic compound is an optionally substituted flavylium ion, such as an optionally substituted anthocyanidin or optionally substituted anthocyanin, or derivative thereof. Non-limiting examples of the bicyclic compounds include epicatechin; quercetin; myricetin; taxifolin; kaempferol; morin; acacetin; naringenin; isorhamnetin; apigenin; cyanidin; cyanin; kuromanin; keracyanin; or a salt or solvate thereof.

[0301] The heterocyclic compound may be any suitable compound, such as an optionally substituted aromatic or non-aromatic ring comprising a heteroatom, as described herein. In one aspect, the heterocyclic is a compound comprising an optionally substituted heterocycloalkyl moiety or an optionally substituted heteroaryl moiety. In another aspect, the optionally substituted heterocycloalkyl moiety or optionally substituted heteroaryl moiety is an optionally substituted 5-membered heterocycloalkyl or an optionally substituted 5-membered heteroaryl moiety. In another aspect, the optionally substituted heterocycloalkyl or optionally substituted heteroaryl moiety is an optionally substituted moiety selected from pyrazolyl, furanyl, imidazolyl, isoxazolyl, oxadiazolyl, oxazolyl, pyrrolyl, pyridyl, pyrimidyl, pyridazinyl, thiazolyl, triazolyl, thienyl, dihydrothieno-pyrazolyl, thianaphthenyl, carbazolyl, benzimidazolyl, benzothienyl, benzofuranyl, indolyl, quinolinyl, benzotriazolyl, benzothiazolyl, benzooxazolyl, benzimidazolyl, isoquinolinyl, isoindolyl, acridinyl, benzoisazolyl, dimethylhydantoin, pyrazinyl, tetrahydrofuranyl, pyrrolinyl, pyrrolidinyl, morpholinyl, indolyl, diazepinyl, azepinyl, thiepinyl, piperidinyl, and oxepinyl. In another aspect, the optionally substituted heterocycloalkyl moiety or optionally substituted heteroaryl moiety is an optionally substituted furanyl. Non-limiting examples of the heterocyclic compounds include (1,2-dihydroxyethyl)-3,4-dihydroxyfuran-2(5H)-one; 4-hydroxy-5-methyl-3-furanone; 5-hydroxy-2(5H)-furanone; [1,2-dihydroxyethyl]furan-2,3,4(5H)-trione; α-hydroxy-γ-butyrolactone; ribonic γ-lactone; aldohexuronicaldohexuronic acid γ-lactone; gluconic acid 5-lactone; 4-hydroxycoumarin; dihydrobenzofuran; 5-(hydroxymethyl)furfural; furoin; 2(5H)-furanone; 5,6-dihydro-2H-pyran-2-one; and 5,6-dihydro-4-hydroxy-6-methyl-2H-pyran-2-one; or a salt or solvate thereof.

[0302] The nitrogen-containing compound may be any suitable compound with one or more (e.g., several) nitrogen atoms. In one aspect, the nitrogen-containing compound comprises an amine, imine, hydroxylamine, or nitroxide moiety. Non-limiting examples of the nitrogen-containing compounds include acetone oxime; violuric acid; pyridine-2-aldoxime; 2-aminophenol; 1,2-benzenediamine; 2,2,6,6-tetramethyl-1-piperidinyloxy; 5,6,7,8-tetrahydrobiopterin; 6,7-dimethyl-5,6,7,8-tetrahydropterine; and maleamic acid; or a salt or solvate thereof.

[0303] The quinone compound may be any suitable compound comprising a quinone moiety as described herein. Non-limiting examples of the quinone compounds include 1,4-benzoquinone; 1,4-naphthoquinone; 2-hydroxy-1,4-naphthoquinone; 2,3-dimethoxy-5-methyl-1,4-benzoquinone or coenzyme Q₀; 2,3,5,6-tetramethyl-1,4-benzoquinone or duroquinone; 1,4-dihydroxyanthraquinone; 3-hydroxy-1-methyl-5,6-indolinedione or adrenochrome; 4-tert-butyl-5-methoxy-1,2-benzoquinone; pyrroloquinoline quinone; or a salt or solvate thereof.

[0304] The sulfur-containing compound may be any suitable compound comprising one or more (e.g., several) sulfur atoms. In one aspect, the sulfur-containing comprises a moiety selected from thionyl, thioether, sulfinyl, sulfonyl, sulfamide, sulfonamide, sulfonic acid, and sulfonic ester. Non-limiting examples of the sulfur-containing compounds include ethanethiol; 2-propanethiol; 2-propene-1-thiol; 2-mercaptoethanesulfonic acid; benzenethiol; benzene-1,2-dithiol; cysteine; methionine; glutathione; cystine; or a salt or solvate thereof.

[0305] In one aspect, an effective amount of such a compound described above to cellulosic material as a molar ratio to glucosyl units of cellulose is about 10⁻⁶ to about 10, e.g., about 10⁻⁶ to about 7.5, about 10⁻⁶ to about 5, about 10⁻⁶ to about 2.5, about 10⁻⁶ to about 1, about 10⁻⁵ to about 1, about 10⁻⁵ to about 10⁻¹, about 10⁻⁴ to about 10⁻¹, about 10⁻³ to about 10⁻¹, or about 10⁻³ to about 10⁻². In another aspect, an effective amount of such a compound described above is about 0.1 μM to about 1 M, e.g., about 0.5 μM to about 0.75 M, about 0.75 μM to about 0.5 M, about 1 μM to about 0.25 M, about 1 μM to about 0.1 M, about 5 μM to about 50 mM, about 10 μM to about 25 mM, about 50 μM to about 25 mM, about 10 μM to about 10 mM, about 5 μM to about 5 mM, or about 0.1 mM to about 1 mM.

[0306] The term “liquor” means the solution phase, either aqueous, organic, or a combination thereof, arising from treatment of a lignocellulose and/or hemicellulose material in a slurry, or monosaccharides thereof, e.g., xylose, arabinose, mannose, etc., under conditions as described herein, and the soluble contents thereof. A liquor for cellulolytic enhancement of a GH61 polypeptide can be produced by treating a lignocellulose or hemicellulose material (or feedstock) by applying heat and/or pressure, optionally in the presence of a catalyst, e.g., acid, optionally in the presence of an organic solvent, and optionally in combination with physical disruption of the material, and then separating the solution from the residual solids. Such conditions determine the degree of cellulolytic enhancement obtainable through the combination of liquor and a GH61 polypeptide during hydrolysis of a cellulosic substrate by a cellulase preparation. The liquor can be separated from the treated material using a method standard in the art, such as filtration, sedimentation, or centrifugation.

[0307] In one aspect, an effective amount of the liquor to cellulose is about 10⁻⁶ to about 10 g per g of cellulose, e.g., about 10⁻⁶ to about 7.5 g, about 10⁻⁶ to about 5 g, about 10⁻⁶ to about 2.5 g, about 10⁻⁶ to about 1 g, about 10⁻⁵ to about 1 g, about 10⁻⁵ to about 10⁻¹ g, about 10⁻⁴ to about 10⁻¹ g, about 10⁻³ to about 10⁻¹ g, or about 10⁻³ to about 10⁻² g per g of cellulose.

[0308] Examples of bacterial endoglucanases that can be used in the methods of the present invention, include, but are not limited to, an Acidothermus cellulolyticus endoglucanase (WO 91/05039; WO 93/15186; U.S. Pat. No. 5,275,944; WO 96/02551; U.S. Pat. No. 5,536,655, WO 00/70031, WO 05/093050); Thermobifida fusca endoglucanase III (WO 05/093050); and Thermobifida fusca endoglucanase V (WO 05/093050).

[0309] Examples of fungal endoglucanases that can be used in the present invention, include, but are not limited to, a Trichoderma reesei endoglucanase I (Penttila et al., 1986, Gene 45: 253-263; Trichoderma reesei Cel7B endoglucanase I (GENBANK™ accession no. M15665; SEQ ID NO: 282); Trichoderma reesei endoglucanase II (Saloheimo, et al., 1988, Gene 63:11-22); Trichoderma reesei Cel5A endoglucanase II (GENBANK™ accession no. M19373; SEQ ID NO: 284); Trichoderma reesei endoglucanase III (Okada et al., 1988, Appl. Environ. Microbiol. 64: 555-563; GENBANK™ accession no. AB003694; SEQ ID NO: 286); Trichoderma reesei endoglucanase V (Saloheimo et al., 1994, Molecular Microbiology 13: 219-228; GENBANK™ accession no. Z33381; SEQ ID NO: 288); Aspergillus aculeatus endoglucanase (Ooi et al., 1990, Nucleic Acids Research 18: 5884); Aspergillus kawachii endoglucanase (Sakamoto et al., 1995, Current Genetics 27: 435-439); Erwinia carotovara endoglucanase (Saarilahti et al., 1990, Gene 90: 9-14); Fusarium oxysporum endoglucanase (GENBANK™ accession no. L29381); Humicola grisea var. thermoidea endoglucanase (GENBANK™ accession no. AB003107); Melanocarpus albomyces endoglucanase (GENBANK™ accession no. MAL515703); Neurospora crassa endoglucanase (GENBANK™ accession no. XM_{—}324477); Humicola insolens endoglucanase V (SEQ ID NO: 290); Myceliophthora thermophila CBS 117.65 endoglucanase (SEQ ID NO: 292); basidiomycete CBS 495.95 endoglucanase (SEQ ID NO: 294); basidiomycete CBS 494.95 endoglucanase (SEQ ID NO: 296); Thielavia terrestris NRRL 8126 CEL6B endoglucanase (SEQ ID NO: 298); Thielavia terrestris NRRL 8126 CEL6C endoglucanase (SEQ ID NO: 300); Thielavia terrestris NRRL 8126 CEL7C endoglucanase (SEQ ID NO: 302); Thielavia terrestris NRRL 8126 CEL7E endoglucanase (SEQ ID NO: 304); Thielavia terrestris NRRL 8126 CEL7F endoglucanase (SEQ ID NO: 306); Cladorrhinum foecundissimum ATCC 62373 CEL7A endoglucanase (SEQ ID NO: 308); and Trichoderma reesei strain No. VTT-D-80133 endoglucanase (GENBANK™ accession no. M15665; SEQ ID NO: 310). The endoglucanases of SEQ ID NO: 282, SEQ ID NO: 284, SEQ ID NO: 286, SEQ ID NO: 288, SEQ ID NO: 290, SEQ ID NO: 292, SEQ ID NO: 294, SEQ ID NO: 296, SEQ ID NO: 298, SEQ ID NO: 300, SEQ ID NO: 302, SEQ ID NO: 304, SEQ ID NO: 306, SEQ ID NO: 308, and SEQ ID NO: 310 described above are encoded by the mature polypeptide coding sequence of SEQ ID NO: 281, SEQ ID NO: 283, SEQ ID NO: 285, SEQ ID NO: 287, SEQ ID NO: 289, SEQ ID NO: 291, SEQ ID NO: 293, SEQ ID NO: 295, SEQ ID NO: 297, SEQ ID NO: 299, SEQ ID NO: 301, SEQ ID NO: 303, SEQ ID NO: 305, SEQ ID NO: 307, and SEQ ID NO: 309, respectively.

[0310] Examples of cellobiohydrolases useful in the present invention include, but are not limited to, Trichoderma reesei cellobiohydrolase I (SEQ ID NO: 312); Trichoderma reesei cellobiohydrolase II (SEQ ID NO: 314); Humicola insolens cellobiohydrolase I (SEQ ID NO: 316); Myceliophthora thermophila cellobiohydrolase II (SEQ ID NO: 318 and SEQ ID NO: 320); Thielavia terrestris cellobiohydrolase II (CEL6A) (SEQ ID NO: 322); Chaetomium thermophilum cellobiohydrolase I (SEQ ID NO: 324); Chaetomium thermophilum cellobiohydrolase II (SEQ ID NO: 326), Aspergillus fumigatus cellobiohydrolase I (SEQ ID NO: 328), and Aspergillus fumigatus cellobiohydrolase II (SEQ ID NO: 330). The cellobiohydrolases of SEQ ID NO: 312, SEQ ID NO: 314, SEQ ID NO: 316, SEQ ID NO: 318, SEQ ID NO: 320, SEQ ID NO: 322, SEQ ID NO: 324, SEQ ID NO: 326, SEQ ID NO: 328, and SEQ ID NO: 330 described above are encoded by the mature polypeptide coding sequence of SEQ ID NO: 311, SEQ ID NO: 313, SEQ ID NO: 315, SEQ ID NO: 317, SEQ ID NO: 319, SEQ ID NO: 321, SEQ ID NO: 323, SEQ ID NO: 325, SEQ ID NO: 327, and SEQ ID NO: 329, respectively.

[0311] Examples of beta-glucosidases useful in the present invention include, but are not limited to, Aspergillus oryzae beta-glucosidase (SEQ ID NO: 332); Aspergillus fumigatus beta-glucosidase (SEQ ID NO: 334); Penicillium brasilianum IBT 20888 beta-glucosidase (SEQ ID NO: 336); Aspergillus niger beta-glucosidase (SEQ ID NO: 338); and Aspergillus aculeatus beta-glucosidase (SEQ ID NO: 340). The beta-glucosidases of SEQ ID NO: 332, SEQ ID NO: 334, SEQ ID NO: 336, SEQ ID NO: 338, and SEQ ID NO: 340 described above are encoded by the mature polypeptide coding sequence of SEQ ID NO: 331, SEQ ID NO: 333, SEQ ID NO: 335, SEQ ID NO: 337, and SEQ ID NO: 339, respectively.

[0312] The Aspergillus oryzae beta-glucosidase can be obtained according to WO 2002/095014. The Aspergillus fumigatus beta-glucosidase can be obtained according to WO 2005/047499. The Penicillium brasilianum beta-glucosidase can be obtained according to WO 2007/019442. The Aspergillus niger beta-glucosidase can be obtained according to Dan et al., 2000, J. Biol. Chem. 275: 4973-4980. The Aspergillus aculeatus beta-glucosidase can be obtained according to Kawaguchi et al., 1996, Gene 173: 287-288.

[0313] The beta-glucosidase may be a fusion protein. In one aspect, the beta-glucosidase is the Aspergillus oryzae beta-glucosidase variant BG fusion protein of SEQ ID NO: 342 or the Aspergillus oryzae beta-glucosidase fusion protein of SEQ ID NO: 344 obtained according to WO 2008/057637. The beta-glucosidase fusion proteins of SEQ ID NO: 342 and SEQ ID NO: 344 are encoded by SEQ ID NO: 341 and SEQ ID NO: 343, respectively.

[0314] Other useful endoglucanases, cellobiohydrolases, and beta-glucosidases are disclosed in numerous Glycosyl Hydrolase families using the classification according to Henrissat B., 1991, A classification of glycosyl hydrolases based on amino-acid sequence similarities, Biochem. J. 280: 309-316, and Henrissat B., and Bairoch A., 1996, Updating the sequence-based classification of glycosyl hydrolases, Biochem. J. 316: 695-696.

[0315] Other cellulolytic enzymes that may be used in the present invention are described in WO 98/13465, WO 98/015619, WO 98/015633, WO 99/06574, WO 99/10481, WO 99/025847, WO 99/031255, WO 2002/101078, WO 2003/027306, WO 2003/052054, WO 2003/052055, WO 2003/052056, WO 2003/052057, WO 2003/052118, WO 2004/016760, WO 2004/043980, WO 2004/048592, WO 2005/001065, WO 2005/028636, WO 2005/093050, WO 2005/093073, WO 2006/074005, WO 2006/117432, WO 2007/071818, WO 2007/071820, WO 2008/008070, WO 2008/008793, U.S. Pat. No. 5,457,046, U.S. Pat. No. 5,648,263, and U.S. Pat. No. 5,686,593.

[0316] In one aspect, the one or more (e.g., several) hemicellulolytic enzymes comprise a commercial hemicellulolytic enzyme preparation. Examples of commercial hemicellulolytic enzyme preparations suitable for use in the present invention include, for example, SHEARZYME™ (Novozymes A/S), CELLIC™ HTec (Novozymes A/S), CELLIC™ HTec2 (Novozymes A/S), VISCOZYME® (Novozymes A/S), ULTRAFLO® (Novozymes A/S), PULPZYME® HC (Novozymes A/S), MULTIFECT® Xylanase (Genencor), ACCELLERASE® XY (Genencor), ACCELLERASE® XC (Genencor), ECOPULP® TX-200A (AB Enzymes), HSP 6000 Xylanase (DSM), DEPOL™ 333P (Biocatalysts Limit, Wales, UK), DEPOL™ 740L. (Biocatalysts Limit, Wales, UK), and DEPOL™ 762P (Biocatalysts Limit, Wales, UK).

[0317] Examples of xylanases useful in the methods of the present invention include, but are not limited to, Aspergillus aculeatus xylanase (GeneSeqP:AAR63790; WO 94/21785), Aspergillus fumigatus xylanases (WO 2006/078256; SEQ ID NO: 346), and Thielavia terrestris NRRL 8126 xylanases (WO 2009/079210).

[0318] Examples of beta-xylosidases useful in the methods of the present invention include, but are not limited to, Trichoderma reesei beta-xylosidase (UniProtKB/TrEMBL accession number Q92458; SEQ ID NO: 348), Talaromyces emersonii beta-xylosidase (SwissProt accession number Q8X212), and Neurospora crassa beta-xylosidase (SwissProt accession number Q7SOW4).

[0319] Examples of acetylxylan esterases useful in the methods of the present invention include, but are not limited to, Hypocrea jecorina acetylxylan esterase (WO 2005/001036), Neurospora crassa acetylxylan esterase (UniProt accession number q7s259), Thielavia terrestris NRRL 8126 acetylxylan esterase (WO 2009/042846), Chaetomium globosum acetylxylan esterase (Uniprot accession number Q2GWX4), Chaetomium gracile acetylxylan esterase (GeneSeqP accession number AAB82124), Phaeosphaeria nodorum acetylxylan esterase (Uniprot accession number QOUHJ1), and Humicola insolens DSM 1800 acetylxylan esterase (WO 2009/073709).

[0320] Examples of ferulic acid esterases useful in the methods of the present invention include, but are not limited to, Humicola insolens DSM 1800 feruloyl esterase (WO 2009/076122), Neurospora crassa feruloyl esterase (UniProt accession number Q9HGR3), and Neosartorya fischeri feruloyl esterase (UniProt Accession number Al D9T4).

[0321] Examples of arabinofuranosidases useful in the methods of the present invention include, but are not limited to, Humicola insolens DSM 1800 arabinofuranosidase (WO 2009/073383) and Aspergillus niger arabinofuranosidase (GeneSeqP accession number AAR94170).

[0322] Examples of alpha-glucuronidases useful in the methods of the present invention include, but are not limited to, Aspergillus clavatus alpha-glucuronidase (UniProt accession number alcc12), Trichoderma reesei alpha-glucuronidase (Uniprot accession number Q99024), Talaromyces emersonii alpha-glucuronidase (UniProt accession number Q8×211), Aspergillus niger alpha-glucuronidase (Uniprot accession number Q96WX9), Aspergillus terreus alpha-glucuronidase (SwissProt accession number Q0CJP9), and Aspergillus fumigatus alpha-glucuronidase (SwissProt accession number Q4WW45).

[0323] In a preferred embodiment, the enzyme composition is a high temperature composition, i.e., a composition that is able to hydrolyze a cellulosic material in the range of about 54° C. to about 65° C. In another preferred embodiment, the enzyme composition is a high temperature composition, i.e., a composition that is able to hydrolyze a cellulosic material at a temperature of about 54° C., about 55° C., about 56° C., about 57° C., about 58° C., about 59° C., about 60° C., about 61° C., about 62° C., about 63° C., about 64° C., or about 65° C. In another preferred embodiment, the enzyme composition is a high temperature composition, i.e., a composition that is able to hydrolyze a cellulosic material at a temperature of at least 54° C., at least 55° C., at least 56° C., at least 57° C., at least 58° C., at least 59° C., at least 60° C., at least 61° C., at least 62° C., at least 63° C., at least 64° C., or at least 65° C.

[0324] In another preferred embodiment, the enzyme composition is a high temperature composition as disclosed in PCT/US2010/055723 (WO 2011/057140), which is incorporated herein in its entirety by reference.

[0325] The polypeptides having enzyme activity used in the methods of the present invention may be produced by fermentation of the above-noted microbial strains on a nutrient medium containing suitable carbon and nitrogen sources and inorganic salts, using procedures known in the art (see, e.g., Bennett, J. W. and LaSure, L. (eds.), More Gene Manipulations in Fungi, Academic Press, CA, 1991). Suitable media are available from commercial suppliers or may be prepared according to published compositions (e.g., in catalogues of the American Type Culture Collection). Temperature ranges and other conditions suitable for growth and enzyme production are known in the art (see, e.g., Bailey, J. E., and Ollis, D. F., Biochemical Engineering Fundamentals, McGraw-Hill Book Company, NY, 1986).

[0326] The fermentation can be any method of cultivation of a cell resulting in the expression or isolation of an enzyme or protein. Fermentation may, therefore, be understood as comprising shake flask cultivation, or small- or large-scale fermentation (including continuous, batch, fed-batch, or solid state fermentations) in laboratory or industrial fermentors performed in a suitable medium and under conditions allowing the enzyme to be expressed or isolated. The resulting enzymes produced by the methods described above may be recovered from the fermentation medium and purified by conventional procedures.

[0327] Fermentation. The fermentable sugars obtained from the hydrolyzed cellulosic material can be fermented by one or more (e.g., several) fermenting microorganisms capable of fermenting the sugars directly or indirectly into a desired fermentation product. “Fermentation” or “fermentation process” refers to any fermentation process or any process comprising a fermentation step. Fermentation processes also include fermentation processes used in the consumable alcohol industry (e.g., beer and wine), dairy industry (e.g., fermented dairy products), leather industry, and tobacco industry. The fermentation conditions depend on the desired fermentation product and fermenting organism and can easily be determined by one skilled in the art.

[0328] In the fermentation step, sugars, released from the cellulosic material as a result of the pretreatment and enzymatic hydrolysis steps, are fermented to a product, e.g., ethanol, by a fermenting organism, such as yeast. Hydrolysis (saccharification) and fermentation can be separate or simultaneous, as described herein.

[0329] Any suitable hydrolyzed cellulosic material can be used in the fermentation step in practicing the present invention. The material is generally selected based on the desired fermentation product, i.e., the substance to be obtained from the fermentation, and the process employed, as is well known in the art.

[0330] The term “fermentation medium” is understood herein to refer to a medium before the fermenting microorganism(s) is(are) added, such as, a medium resulting from a saccharification process, as well as a medium used in a simultaneous saccharification and fermentation process (SSF).

[0331] “Fermenting microorganism” refers to any microorganism, including bacterial and fungal organisms, suitable for use in a desired fermentation process to produce a fermentation product. The fermenting organism can be hexose and/or pentose fermenting organisms, or a combination thereof. Both hexose and pentose fermenting organisms are well known in the art. Suitable fermenting microorganisms are able to ferment, i.e., convert, sugars, such as glucose, xylose, xylulose, arabinose, maltose, mannose, galactose, and/or oligosaccharides, directly or indirectly into the desired fermentation product.

[0332] Examples of bacterial and fungal fermenting organisms producing ethanol are described by Lin et al., 2006, Appl. Microbiol. Biotechnol. 69: 627-642.

[0333] Examples of fermenting microorganisms that can ferment hexose sugars include bacterial and fungal organisms, such as yeast. Preferred yeast includes strains of Candida, Kluyveromyces, and Saccharomyces, e.g., Candida sonorensis, Kluyveromyces marxianus, and Saccharomyces cerevisiae.

[0334] Examples of fermenting organisms that can ferment pentose sugars in their native state include bacterial and fungal organisms, such as some yeast. Preferred xylose fermenting yeast include strains of Candida, preferably C. sheatae or C. sonorensis; and strains of Pichia, preferably P. stipitis, such as P. stipitis CBS 5773. Preferred pentose fermenting yeast include strains of Pachysolen, preferably P. tannophilus. Organisms not capable of fermenting pentose sugars, such as xylose and arabinose, may be genetically modified to do so by methods known in the art.

[0335] Examples of bacteria that can efficiently ferment hexose and pentose to ethanol include, for example, Bacillus coagulans, Clostridium acetobutylicum, Clostridium thermocellum, Clostridium phytofermentans, Geobacillus sp., Thermoanaerobacter saccharolyticum, and Zymomonas mobilis (Philippidis, 1996, supra).

[0336] Other fermenting organisms include strains of Bacillus, such as Bacillus coagulans; Candida, such as C. sonorensis, C. methanosorbosa, C. diddensiae, C. parapsilosis, C. naedodendra, C. blankii, C. entomophilia, C. brassicae, C. pseudotropicalis, C. boidinii, C. utilis, and C. scehatae; Clostridium, such as C. acetobutylicum, C. thermocellum, and C. phytofermentans; E. coli, especially E. coli strains that have been genetically modified to improve the yield of ethanol; Geobacillus sp.; Hansenula, such as Hansenula anomala; Klebsiella, such as K. oxytoca; Kluyveromyces, such as K. marxianus, K. lactis, K. thermotolerans, and K. fragilis; Schizosaccharomyces, such as S. pombe; Thermoanaerobacter, such as Thermoanaerobacter saccharolyticum; and Zymomonas, such as Zymomonas mobilis.

[0337] In a preferred aspect, the yeast is a Bretannomyces. In a more preferred aspect, the yeast is Bretannomyces clausenii. In another preferred aspect, the yeast is a Candida. In another more preferred aspect, the yeast is Candida sonorensis. In another more preferred aspect, the yeast is Candida boidinii. In another more preferred aspect, the yeast is Candida blankii. In another more preferred aspect, the yeast is Candida brassicae. In another more preferred aspect, the yeast is Candida diddensii. In another more preferred aspect, the yeast is Candida entomophiliia. In another more preferred aspect, the yeast is Candida pseudotropicalis. In another more preferred aspect, the yeast is Candida scehatae. In another more preferred aspect, the yeast is Candida utilis. In another preferred aspect, the yeast is a Clavispora. In another more preferred aspect, the yeast is Clavispora lusitaniae. In another more preferred aspect, the yeast is Clavispora opuntiae. In another preferred aspect, the yeast is a Kluyveromyces. In another more preferred aspect, the yeast is Kluyveromyces fragilis. In another more preferred aspect, the yeast is Kluyveromyces marxianus. In another more preferred aspect, the yeast is Kluyveromyces thermotolerans. In another preferred aspect, the yeast is a Pachysolen. In another more preferred aspect, the yeast is Pachysolen tannophilus. In another preferred aspect, the yeast is a Pichia. In another more preferred aspect, the yeast is a Pichia stipitis. In another preferred aspect, the yeast is a Saccharomyces spp. In another more preferred aspect, the yeast is Saccharomyces cerevisiae. In another more preferred aspect, the yeast is Saccharomyces distaticus. In another more preferred aspect, the yeast is Saccharomyces uvarum.

[0338] In a preferred aspect, the bacterium is a Bacillus. In a more preferred aspect, the bacterium is Bacillus coagulans. In another preferred aspect, the bacterium is a Clostridium. In another more preferred aspect, the bacterium is Clostridium acetobutylicum. In another more preferred aspect, the bacterium is Clostridium phytofermentans. In another more preferred aspect, the bacterium is Clostridium thermocellum. In another more preferred aspect, the bacterium is Geobacilus sp. In another more preferred aspect, the bacterium is a Thermoanaerobacter. In another more preferred aspect, the bacterium is Thermoanaerobacter saccharolyticum. In another preferred aspect, the bacterium is a Zymomonas. In another more preferred aspect, the bacterium is Zymomonas mobilis.

[0339] Commercially available yeast suitable for ethanol production include, e.g., BIOFERM™ AFT and XR (NABC—North American Bioproducts Corporation, GA, USA), ETHANOL RED™ yeast (Fermentis/Lesaffre, USA), FALI™ (Fleischmann's Yeast, USA), FERMIOL™ (DSM Specialties), GERT STRAND™ (Gert Strand AB, Sweden), and SUPERSTART™ and THERMOSACC™ fresh yeast (Ethanol Technology, WI, USA).

[0340] In a preferred aspect, the fermenting microorganism has been genetically modified to provide the ability to ferment pentose sugars, such as xylose utilizing, arabinose utilizing, and xylose and arabinose co-utilizing microorganisms.

[0341] The cloning of heterologous genes into various fermenting microorganisms has led to the construction of organisms capable of converting hexoses and pentoses to ethanol (co-fermentation) (Chen and Ho, 1993, Cloning and improving the expression of Pichia stipitis xylose reductase gene in Saccharomyces cerevisiae, Appl. Biochem. Biotechnol. 39-40: 135-147; Ho et al., 1998, Genetically engineered Saccharomyces yeast capable of effectively cofermenting glucose and xylose, Appl. Environ. Microbiol. 64: 1852-1859; Kotter and Ciriacy, 1993, Xylose fermentation by Saccharomyces cerevisiae, Appl. Microbiol. Biotechnol. 38: 776-783; Walfridsson et al., 1995, Xylose-metabolizing Saccharomyces cerevisiae strains overexpressing the TKL1 and TALI genes encoding the pentose phosphate pathway enzymes transketolase and transaldolase, Appl. Environ. Microbiol. 61: 4184-4190; Kuyper et al., 2004, Minimal metabolic engineering of Saccharomyces cerevisiae for efficient anaerobic xylose fermentation: a proof of principle, FEMS Yeast Research 4: 655-664; Beall et al., 1991, Parametric studies of ethanol production from xylose and other sugars by recombinant Escherichia coli, Biotech. Bioeng. 38: 296-303; Ingram et al., 1998, Metabolic engineering of bacteria for ethanol production, Biotechnol. Bioeng. 58: 204-214; Zhang et al., 1995, Metabolic engineering of a pentose metabolism pathway in ethanologenic Zymomonas mobilis, Science 267: 240-243; Deanda et al., 1996, Development of an arabinose-fermenting Zymomonas mobilis strain by metabolic pathway engineering, Appl. Environ. Microbiol. 62: 4465-4470; WO 2003/062430, xylose isomerase).

[0342] In a preferred aspect, the genetically modified fermenting microorganism is Candida sonorensis. In another preferred aspect, the genetically modified fermenting microorganism is Escherichia coli. In another preferred aspect, the genetically modified fermenting microorganism is Klebsiella oxytoca. In another preferred aspect, the genetically modified fermenting microorganism is Kluyveromyces marxianus. In another preferred aspect, the genetically modified fermenting microorganism is Saccharomyces cerevisiae. In another preferred aspect, the genetically modified fermenting microorganism is Zymomonas mobilis.

[0343] It is well known in the art that the organisms described above can also be used to produce other substances, as described herein.

[0344] The fermenting microorganism is typically added to the degraded cellulosic material or hydrolysate and the fermentation is performed for about 8 to about 96 hours, e.g., about 24 to about 60 hours. The temperature is typically between about 26° C. to about 60° C., e.g., about 32° C. or 50° C., and about pH 3 to about pH 8, e.g., pH 4-5, 6, or 7.

[0345] In one aspect, the yeast and/or another microorganism are applied to the degraded cellulosic material and the fermentation is performed for about 12 to about 96 hours, such as typically 24-60 hours. In another aspect, the temperature is preferably between about 20° C. to about 60° C., e.g., about 25° C. to about 50° C., about 32° C. to about 50° C., or about 32° C. to about 50° C., and the pH is generally from about pH 3 to about pH 7, e.g., about pH 4 to about pH 7. However, some fermenting organisms, e.g., bacteria, have higher fermentation temperature optima. Yeast or another microorganism is preferably applied in amounts of approximately 10⁵ to 10¹², preferably from approximately 10⁷ to 10¹⁰, especially approximately 2×10⁸ viable cell count per ml of fermentation broth. Further guidance in respect of using yeast for fermentation can be found in, e.g., “The Alcohol Textbook” (Editors K. Jacques, T. P. Lyons and D. R. Kelsall, Nottingham University Press, United Kingdom 1999), which is hereby incorporated by reference.

[0346] A fermentation stimulator can be used in combination with any of the processes described herein to further improve the fermentation process, and in particular, the performance of the fermenting microorganism, such as, rate enhancement and ethanol yield. A “fermentation stimulator” refers to stimulators for growth of the fermenting microorganisms, in particular, yeast. Preferred fermentation stimulators for growth include vitamins and minerals. Examples of vitamins include multivitamins, biotin, pantothenate, nicotinic acid, meso-inositol, thiamine, pyridoxine, para-aminobenzoic acid, folic acid, riboflavin, and Vitamins A, B, C, D, and E. See, for example, Alfenore et al., Improving ethanol production and viability of Saccharomyces cerevisiae by a vitamin feeding strategy during fed-batch process, Springer-Verlag (2002), which is hereby incorporated by reference. Examples of minerals include minerals and mineral salts that can supply nutrients comprising P, K, Mg, S, Ca, Fe, Zn, Mn, and Cu.

[0347] Fermentation Products:

[0348] A fermentation product can be any substance derived from the fermentation. The fermentation product can be, without limitation, an alcohol (e.g., arabinitol, n-butanol, isobutanol, ethanol, glycerol, methanol, ethylene glycol, 1,3-propanediol [propylene glycol], butanediol, glycerin, sorbitol, and xylitol); an alkane (e.g., pentane, hexane, heptane, octane, nonane, decane, undecane, and dodecane), a cycloalkane (e.g., cyclopentane, cyclohexane, cycloheptane, and cyclooctane), an alkene (e.g. pentene, hexene, heptene, and octene); an amino acid (e.g., aspartic acid, glutamic acid, glycine, lysine, serine, and threonine); a gas (e.g., methane, hydrogen (H₂), carbon dioxide (CO₂), and carbon monoxide (CO)); isoprene; a ketone (e.g., acetone); an organic acid (e.g., acetic acid, acetonic acid, adipic acid, ascorbic acid, citric acid, 2,5-diketo-D-gluconic acid, formic acid, fumaric acid, glucaric acid, gluconic acid, glucuronic acid, glutaric acid, 3-hydroxypropionic acid, itaconic acid, lactic acid, malic acid, malonic acid, oxalic acid, oxaloacetic acid, propionic acid, succinic acid, and xylonic acid); and polyketide. The fermentation product can also be protein as a high value product.

[0349] In a preferred aspect, the fermentation product is an alcohol. It will be understood that the term “alcohol” encompasses a substance that contains one or more hydroxyl moieties. In a more preferred aspect, the alcohol is n-butanol. In another more preferred aspect, the alcohol is isobutanol. In another more preferred aspect, the alcohol is ethanol. In another more preferred aspect, the alcohol is methanol. In another more preferred aspect, the alcohol is arabinitol. In another more preferred aspect, the alcohol is butanediol. In another more preferred aspect, the alcohol is ethylene glycol. In another more preferred aspect, the alcohol is glycerin. In another more preferred aspect, the alcohol is glycerol. In another more preferred aspect, the alcohol is 1,3-propanediol. In another more preferred aspect, the alcohol is sorbitol. In another more preferred aspect, the alcohol is xylitol. See, for example, Gong, C. S., Cao, N. J., Du, J., and Tsao, G. T., 1999, Ethanol production from renewable resources, in Advances in Biochemical Engineering/Biotechnology, Scheper, T., ed., Springer-Verlag Berlin Heidelberg, Germany, 65: 207-241; Silveira, M. M., and Jonas, R., 2002, The biotechnological production of sorbitol, Appl. Microbiol. Biotechnol. 59: 400-408; Nigam, P., and Singh, D., 1995, Processes for fermentative production of xylitol—a sugar substitute, Process Biochemistry 30 (2): 117-124; Ezeji, T. C., Qureshi, N. and Blaschek, H. P., 2003, Production of acetone, butanol and ethanol by Clostridium beijerinckii BA101 and in situ recovery by gas stripping, World Journal of Microbiology and Biotechnology 19 (6): 595-603.

[0350] In another preferred aspect, the fermentation product is an alkane. The alkane can be an unbranched or a branched alkane. In another more preferred aspect, the alkane is pentane. In another more preferred aspect, the alkane is hexane. In another more preferred aspect, the alkane is heptane. In another more preferred aspect, the alkane is octane. In another more preferred aspect, the alkane is nonane. In another more preferred aspect, the alkane is decane. In another more preferred aspect, the alkane is undecane. In another more preferred aspect, the alkane is dodecane.

[0351] In another preferred aspect, the fermentation product is a cycloalkane. In another more preferred aspect, the cycloalkane is cyclopentane. In another more preferred aspect, the cycloalkane is cyclohexane. In another more preferred aspect, the cycloalkane is cycloheptane. In another more preferred aspect, the cycloalkane is cyclooctane.

[0352] In another preferred aspect, the fermentation product is an alkene. The alkene can be an unbranched or a branched alkene. In another more preferred aspect, the alkene is pentene. In another more preferred aspect, the alkene is hexene. In another more preferred aspect, the alkene is heptene. In another more preferred aspect, the alkene is octene.

[0353] In another preferred aspect, the fermentation product is an amino acid. In another more preferred aspect, the organic acid is aspartic acid. In another more preferred aspect, the amino acid is glutamic acid. In another more preferred aspect, the amino acid is glycine. In another more preferred aspect, the amino acid is lysine. In another more preferred aspect, the amino acid is serine. In another more preferred aspect, the amino acid is threonine. See, for example, Richard, A., and Margaritis, A., 2004, Empirical modeling of batch fermentation kinetics for poly(glutamic acid) production and other microbial biopolymers, Biotechnology and Bioengineering 87 (4): 501-515.

[0354] In another preferred aspect, the fermentation product is a gas. In another more preferred aspect, the gas is methane. In another more preferred aspect, the gas is H₂. In another more preferred aspect, the gas is CO₂. In another more preferred aspect, the gas is CO. See, for example, Kataoka, N., A. Miya, and K. Kiriyama, 1997, Studies on hydrogen production by continuous culture system of hydrogen-producing anaerobic bacteria, Water Science and Technology 36 (6-7): 41-47; and Gunaseelan V. N. in Biomass and Bioenergy, Vol. 13 (1-2), pp. 83-114, 1997, Anaerobic digestion of biomass for methane production: A review.

[0355] In another preferred aspect, the fermentation product is isoprene.

[0356] In another preferred aspect, the fermentation product is a ketone. It will be understood that the term “ketone” encompasses a substance that contains one or more ketone moieties. In another more preferred aspect, the ketone is acetone. See, for example, Qureshi and Blaschek, 2003, supra.

[0357] In another preferred aspect, the fermentation product is an organic acid. In another more preferred aspect, the organic acid is acetic acid. In another more preferred aspect, the organic acid is acetonic acid. In another more preferred aspect, the organic acid is adipic acid. In another more preferred aspect, the organic acid is ascorbic acid. In another more preferred aspect, the organic acid is citric acid. In another more preferred aspect, the organic acid is 2,5-diketo-D-gluconic acid. In another more preferred aspect, the organic acid is formic acid. In another more preferred aspect, the organic acid is fumaric acid. In another more preferred aspect, the organic acid is glucaric acid. In another more preferred aspect, the organic acid is gluconic acid. In another more preferred aspect, the organic acid is glucuronic acid. In another more preferred aspect, the organic acid is glutaric acid. In another preferred aspect, the organic acid is 3-hydroxypropionic acid. In another more preferred aspect, the organic acid is itaconic acid. In another more preferred aspect, the organic acid is lactic acid. In another more preferred aspect, the organic acid is malic acid. In another more preferred aspect, the organic acid is malonic acid. In another more preferred aspect, the organic acid is oxalic acid. In another more preferred aspect, the organic acid is propionic acid. In another more preferred aspect, the organic acid is succinic acid. In another more preferred aspect, the organic acid is xylonic acid. See, for example, Chen, R., and Lee, Y. Y., 1997, Membrane-mediated extractive fermentation for lactic acid production from cellulosic biomass, Appl. Biochem. Biotechnol. 63-65: 435-448.

[0358] In another preferred aspect, the fermentation product is polyketide.

[0359] Recovery.

[0360] The fermentation product(s) can be optionally recovered from the fermentation medium using any method known in the art including, but not limited to, chromatography, electrophoretic procedures, differential solubility, distillation, or extraction. For example, alcohol is separated from the fermented cellulosic material and purified by conventional methods of distillation. Ethanol with a purity of up to about 96 vol. % can be obtained, which can be used as, for example, fuel ethanol, drinking ethanol, i.e., potable neutral spirits, or industrial ethanol.

[0361] The present invention is further described by the following examples which should not be construed as limiting the scope of the invention.

### EXAMPLES

### Media

[0362] 2XYT plates were composed of 16 g of tryptone, 10 g of yeast extract, 5 g of NaCl, 15 g of Noble agar, and deionized water to 1 liter.

[0363] LB medium was composed of 10 g of Bacto-Tryptone, 5 g of yeast extract, 10 g of sodium chloride, and deionized water to 1 liter.

[0364] Lactobacilli MRS broth was composed of 55 g of Difco™ Lactobacilli MRS Broth and deionized water to 1 liter.

### Example 1

### Cloning of a Bacillus licheniformis Chitin Binding Protein

[0365] Plasmid pBW77 was constructed by PCR amplification of the BLP00581 gene which encodes a chitin binding protein from Bacillus licheniformis strain SJ1904 (WO 94/014968) using primers 060710 and 060711 shown below. Primer 060710 incorporates a Sac I restriction site, while primer 060711 incorporates an M/u I restriction site. Genomic DNA was obtained according to the procedure of Pitcher et al., 1989, Lett. Appl. Microbiol. 8: 151-156.

Primer 060710:
(SEQ ID NO: 349)
5′-GAGCTCAAAAGAGAGGGGATTGTAACATGTATCGTTTGCC-3′
Primer 060711:
(SEQ ID NO: 350)
5′-ACGCGTTATTTGTTCACTAGATCAACATCAATC-3′

[0366] The PCR amplification was performed in triplicate in 50 μl reactions composed of 1 ng of Bacillus licheniformis SJ1904 genomic DNA, 0.4 μM each of primers 060710 and 060711, 200 μM each of dATP, dCTP, dGTP, and dTTP, 1×PCR Buffer II (Applied Biosystems, Inc., Foster City, Calif., USA) with 2.5 mM MgCl₂, and 2.5 units of AmpliTaq GOLD® DNA Polymerase (Applied Biosystems, Inc., Foster City, Calif., USA). The reactions were performed in a ROBOCYCLER® 40 Temperature Cycler (Agilent Technologies, Inc., Santa Clara, Calif., USA) programmed for 1 cycle at 95° C. for 2 minutes; 30 cycles each at 95° C. for 1 minute, 55° C. for 1 minute, and 72° C. for 1 minute; and 1 cycle at 72° C. for 7 minutes.

[0367] The resulting PCR product was cloned into pCR®2.1-TOPO® (Invitrogen Corp., Carlsbad, Calif., USA) using a TOPO® TA Cloning Kit (Invitrogen Corp., Carlsbad, Calif., USA) according to the manufacturer's instructions and transformed into ONE SHOT® TOP10 Chemically Competent E. coli cells (Invitrogen Corp., Carlsbad, Calif., USA) according to the manufacturer's instructions. Transformants were selected on 2XYT agar plates supplemented with 100 μg of ampicillin per ml. Plasmid DNA was isolated from eight transformants using a BIOROBOT® 9600 (QIAGEN Inc., Valencia, Calif., USA) and verified to contain the chitin binding protein gene fragment by digestion with Sac I and Mlu I followed by 0.8% agarose gel electrophoresis using 0.5×TBE buffer (22 mM Tris base, 22 mM boric acid, 0.25 mM EDTA). One plasmid with an expected restriction fragment of approximately 600 bp was identified and designated pBW77. The DNA sequence of the cloned fragment was verified by DNA sequencing using M13 forward and reverse primers.

[0368] Plasmids pNBT36 (WO 2008/140615) and pBW77 were digested with Sac I and Mlu I. The digested plasmids were subjected to 0.8% agarose gel electrophoresis using 0.5×TBE buffer. A 6.8 kb vector fragment from pNBT36 and a 600 bp chitin binding protein gene insert fragment from pBW77 were excised from the gels and extracted using a QIAQUICK® Gel Extraction Kit QIAGEN Inc., Valencia, Calif., USA). The vector fragment and chitin binding protein gene insert fragment were ligated together using a Rapid DNA Ligation Kit (Roche Applied Science, Indianapolis, Ind., USA) and the ligation mix was transformed into E. coli SURE® cells (Stratagene Corp., La Jolla, Calif., USA) selecting for ampicillin resistance according to the manufacturer's instructions. Plasmid DNA was purified from several transformants using a BIOROBOT® 9600 and analyzed by Afl II digestion followed by 0.8% agarose gel electrophoresis using 0.5×TBE buffer. One plasmid with expected restriction fragments of approximately 3.3 kb, 2.3 kb, and 1.8 kb was identified and designated pBW78 (FIG. 1).

[0369] Competent cells of Bacillus subtilis 164Δ5 (U.S. Pat. No. 5,891,701) were transformed with linearized pBW78 (digested with Sca I) according to the method of Young and Spizizen, 1961, Journal of Bacteriology 81: 823-829, or Dubnau and Davidoff-Abelson, 1971, Journal of Molecular Biology 56: 209-221. Bacillus subtilis transformants were selected at 37° C. after 16 hours of growth on TBAB plates supplemented with 5 μg of chloramphenicol per ml. Linearizing the plasmid ensures a double-crossover recombination event, thereby not inserting any of the vector DNA. A chloramphenicol resistant transformant was identified which harbored the Bacillus licheniformis chitin binding protein gene expression cassette in the amyE locus and designated Bacillus subtilis BW205.

### Example 2

### Characterization of the Bacillus licheniformis Chitin Binding Protein Encoding Sequence

[0370] The genomic DNA sequence and deduced amino acid sequence of the Bacillus licheniformis chitin binding protein encoding sequence are shown in SEQ ID NO: 1 and SEQ ID NO: 2, respectively. The genomic DNA sequence of 612 bp (including the stop codon) encodes a polypeptide of 203 amino acids. Using the SignalP software program (Nielsen et al., 1997, Protein Engineering 10:1-6), a signal peptide of 31 residues was predicted. The predicted mature protein contains 172 amino acids with a predicted molecular mass of 19 kDa and a predicted isoelectric point of 6.3.

### Example 3

### Preparation of the Bacillus licheniformis Chitin Binding Protein

[0371] Bacillus subtilis strain BW205 was grown in 1 ml of LB medium in a 10 ml test tube to mid-log phase at 37° C. with shaking at 250 rpm. This culture was used to inoculate 1.5 liters of Lactobacilli MRS broth, which was divided into two 750 ml cultures, each in a 2.8 liter baffled flask. The cultures were grown for 48 hours at 37′C with shaking at 250 rpm to allow for production of the B. licheniformis chitin binding protein. The cultures were centrifuged in a Sorvall RC 6+ centrifuge at 6000 rpm for 10 minutes at 4′C using a FIBERLITE® F14-6x250y rotor (ThermoFisher Scientific Inc., Rockford, Ill., USA) to remove cells and other particulate matter. The supernatants were combined and used as the source for the Bacillus licheniformis chitin binding protein.

### Example 4

### Pretreatment of Corn Stover

[0372] Corn stover was pretreated at the U.S. Department of Energy National Renewable Energy Laboratory (NREL) using 1.4% (w/v) sulfuric acid for 8 minutes at 165° C. and 107 psi. The water-insoluble solids in the pretreated corn stover contained 57.5% cellulose, 4.6% hemicellulose, and 28.4% lignin. Cellulose and hemicellulose were determined by a two-stage sulfuric acid hydrolysis with subsequent analysis of sugars by high performance liquid chromatography using NREL Standard Analytical Procedure #002. Lignin was determined gravimetrically after hydrolyzing the cellulose and hemicellulose fractions with sulfuric acid using NREL Standard Analytical Procedure #003.

[0373] The pretreated corn stover (PCS) was milled (dry weight 32.35%) in a Cosmos ICMG 40 wet multi-utility grinder (EssEmm Corporation, Tamil Nadu, India), and then adjusted to pH 5.0 by repeated addition of 10 N NaOH in aliquots of a few milliliters, followed by thorough mixing and incubation at room temperature for approximately 1 hour. The pH was confirmed after overnight incubation at 4° C. and the pH-adjusted corn stover was autoclaved for 20 minutes at approximately 120° C., and then stored at 4° C. to minimize the risk of microbial contamination. The dry weight of the pretreated corn stover was 33% TS (total solids), which was confirmed before each use.

### Example 5

### Preparation of Phosphoric Acid Swollen Cellulose (PASC)

[0374] A 1% phosphoric acid swollen cellulose (PASC) slurry was prepared from AVICEL® PH101 (Sigma-Aldrich, St. Louis, Mo., USA) using the protocol described by Zhang et al., 2006, Biomacromolecules 7: 644-648.

### Example 6

### Hydrolysis Assay

[0375] The effect of the B. licheniformis chitin binding protein on the cellulolytic activity of a cellulase preparation was evaluated according to the procedures described below.

[0376] A blend of an Aspergillus aculeatus GH10 xylanase (WO 94/021785) and a Trichoderma reesei cellulase preparation containing Aspergillus fumigatus beta-glucosidase (WO 2005/047499) and Thermoascus aurantiacus GH61A polypeptide (WO 2005/074656) available from Novozymes A/S, Bagsvaerd, Denmark, was used as the cellulase preparation. The cellulase preparation is designated herein in the Examples as “Trichoderma reesei cellulase composition”.

[0377] The hydrolysis of PCS was conducted using 2.0 ml deep-well plates (Axygen Scientific, Union City, Calif., USA) in a total reaction volume of 1.0 ml. Each hydrolysis was performed with 50 mg of PCS (total insoluble solids; 28.8 mg of cellulose) per ml of 50 mM sodium acetate pH 5.0 buffer containing the T. reesei cellulase composition at 2 mg protein per gram of cellulose, plus 1 mM manganese sulfate with and without the B. licheniformis chitin binding protein at 0.2 or 1 mg per g cellulose. The B. licheniformis chitin binding protein and manganese sulfate were preincubated for 10 minutes at 23° C. before mixing with the Trichoderma reesei cellulase composition, PCS, and buffer. The plate was then sealed using an ALPS-300™ or ALPS-3000™ plate heat sealer (Abgene, Epsom, United Kingdom), mixed thoroughly, and incubated at 50° C. for 1-7 days in an Isotemp Plus incubator (Thermo Fisher Scientific Inc., Waltham, Mass., USA). All experiments were performed at least in triplicate.

[0378] The hydrolysis of PASC was conducted as described as above, with the exception of using 5 mg of PASC per ml containing no T. reesei cellulase composition, with or without 10 mg of T. aurantiacus GH61A polypeptide and/or 10 mg of B. licheniformis chitin binding protein per gram of cellulose, with or without 5 mM pyrogallol, 1 mM manganese sulfate, for 3 days.

[0379] Following hydrolysis, samples were filtered using a 0.45 μm MULTISCREEN® 96-well filter plate (Millipore, Bedford, Mass., USA) and filtrates analyzed for sugar content as described below. When not used immediately, filtered aliquots were frozen at −20° C. The sugar concentrations of samples, diluted to appropriate concentrations in 0.005 M H₂SO₄, were measured using a 4.6×250 mm AMINEX® HPX-87H column (Bio-Rad Laboratories, Inc., Hercules, Calif., USA) by elution with 0.05% (w/w) benzoic acid-0.005 M H₂SO₄ at 65° C. at a flow rate of 0.6 ml per minute, and quantitated by integration of the glucose and cellobiose signals from refractive index detection (CHEMSTATION®, AGILENT® 1100 HPLC, Agilent Technologies, Santa Clara, Calif., USA) calibrated by pure sugar samples. The resultant glucose and cellobiose equivalents were used to calculate the percentage of cellulose conversion for each reaction. Measured sugar concentrations were adjusted for the appropriate dilution factor. Data were processed using MICROSOFT EXCEL™ software (Microsoft, Richland, Wash., USA).

[0380] Percent conversion was calculated based on the mass ratio of solubilized glucosyl units to the initial mass of insoluble cellulose. Only glucose and cellobiose were measured for soluble sugars, as cellodextrins longer than cellobiose were present in negligible concentrations (due to enzymatic hydrolysis). The extent of total cellulose conversion was calculated using the Equation 1:

[symbol]

×100 (Equation 1)

[0381] The 1.111 and 1.053 factors for glucose and cellobiose, respectively, take into account the increase in mass when the glucosyl units in cellulose (average molecular mass of 162 daltons) are converted to glucose (molecular mass of 180 daltons) or cellobiose glucosyl units (average molecular mass of 171 daltons).

### Example 7

### Preparation of Thermoascus aurantiacus GH61A Polypeptide Having Cellulolytic Enhancing Activity

[0382] Thermoascus aurantiacus GH61A polypeptide was recombinantly produced in Aspergillus oryzae JaL250 according to WO 2005/074656. The recombinantly produced T. aurantiacus GH61A polypeptide was first concentrated by ultrafiltration using a 10 kDa membrane, buffer exchanged into 20 mM Tris-HCl pH 8.0, and then purified using a 20 ml MONO Q® column (GE Healthcare, Piscataway, N.J., USA) with a 500 ml 0-600 mM NaCl linear gradient in 20 mM Tris-HCl pH 8.0. Fractions were collected and pooled based on SDS-PAGE. The pooled fractions were concentrated by ultrafiltration using a 10 kDa membrane, and chromatographed using a 320 ml SUPERDEX® 75 SEC column (GE Healthcare, Piscataway, N.J., USA) with isocratic elution of approximately 1.3 liters of 150 mM NaCl-20 mM Tris-HCl pH 8.0. Fractions were collected and pooled based on SDS-PAGE. Pooled fractions were concentrated and desalted into 20 mM Tris-HCl pH 8.5 using a VIVASPIN® 20 10 kDa MWCO centrifugal concentration filter (GE Healthcare UK limited, Little Chalfont, Buckinghamshire, UK). Protein concentration was determined using a Microplate BCA™ Protein Assay Kit (ThermoFisher Scientific Inc., Rockford, Ill., USA) in which bovine serum albumin was used as a protein standard.

### Example 8

### Effect of the Bacillus licheniformis Chitin Binding Protein on Hydrolysis of PCS by the Trichoderma reesei Cellulase Composition

[0383] The effect of the Bacillus licheniformis chitin binding protein on the hydrolysis of PCS by the T. reesei cellulase composition was determined using the experimental conditions and procedures described in Example 6.

[0384] The effect of the chitin binding protein on hydrolysis of PCS by the T. reesei cellulase composition was quantified by determining the ratio of percent conversion of the cellulosic material in the presence of the chitin binding protein to the percent conversion of PCS in the absence of chitin binding protein as shown in Equation 2:

$$CBP enhancement effect = \frac{\% {conversion}_{( + CBP )}}{\% {conversion}_{ ( no CBP )}} \qquad ( Equation 2 )$$

[0385] Stimulation of hydrolysis by the chitin binding protein yields a ratio>1; inhibition of hydrolysis yields a ratio<1, and no effect on hydrolysis yields a ratio=1.

[0386] The T. reesei cellulase composition hydrolyzed 24.3±0.4%, 36.4±2.0%, and 40.1±1.7% of the cellulose of the starting PCS after 1, 3, and 7 days, respectively. The presence of the B. licheniformis chitin binding protein noticeably enhanced the hydrolysis of PCS by the T. reesei cellulase composition, resulting in a CBP enhancement effect>1. FIG. 2 shows the CBP enhancement effect measured after one day of hydrolysis at 0.2 and 1.0 mg of B. licheniformis chitin binding protein per gram of cellulose. The enhancement depended on the chitin binding protein concentration.

### Example 9

### Effect of the Bacillus licheniformis Chitin Binding Protein on Degradation of PASC

[0387] The effect of the Bacillus licheniformis chitin binding protein on degrading PASO was determined using the experimental conditions and procedures described in Example 6.

[0388] FIG. 3 shows (1) the effect of the chitin binding protein in degrading PASO, and (2) the effect of the chitin binding protein on the degradation of PASO in the presence of the T. aurantiacus GH61A polypeptide, manganese sulfate, and pyrogallol for 3 days. When assayed alone, both GH61 and chitin binding protein preparations showed activity in degrading PASC. When combined, a synergism between the two proteins was observed, as shown by an apparent synergistic effect of 1.75±0.06 calculated according to Equation 3.

$$CBP - GH 61 synergistic effect = \frac{\% {conversion}_{( + CBP + GH 61 )}}{\% {conversion}_{( + CBP )} + \% {conversion}_{( + GH 61 )}} \qquad ( Equation 3 )$$

[0389] Synergism between a chitin binding protein and a GH61 polypeptide yields a ratio>1; additiveness yields a ratio=1, and inhibition yields a ratio<1.

[0390] The present invention is further described by the following numbered paragraphs:

[0391] [1] A method for degrading or converting a cellulosic material, comprising: treating the cellulosic material with an enzyme composition in the presence of a chitin binding protein.

[0392] [2] The method of paragraph 1, wherein the chitin binding protein is selected from the group consisting of: (a) a chitin binding protein having at least 60% sequence identity to the full-length or mature chitin binding protein of SEQ ID NO: 2, SEQ ID NO: 4, SEQ ID NO: 6, SEQ ID NO: 8, SEQ ID NO: 10, SEQ ID NO: 12, SEQ ID NO: 14, SEQ ID NO: 16, SEQ ID NO: 18, SEQ ID NO: 20, SEQ ID NO: 22, SEQ ID NO: 24, SEQ ID NO: 26, SEQ ID NO: 28, SEQ ID NO: 30, SEQ ID NO: 32, SEQ ID NO: 34, SEQ ID NO: 36, SEQ ID NO: 38, SEQ ID NO: 40, SEQ ID NO: 42, SEQ ID NO: 44, SEQ ID NO: 46, SEQ ID NO: 48, SEQ ID NO: 50, SEQ ID NO: 52, SEQ ID NO: 54, SEQ ID NO: 56, SEQ ID NO: 58, SEQ ID NO: 60, SEQ ID NO: 62, SEQ ID NO: 64, SEQ ID NO: 66, SEQ ID NO: 68, SEQ ID NO: 70, SEQ ID NO: 72, SEQ ID NO: 74, SEQ ID NO: 76, SEQ ID NO: 78, SEQ ID NO: 80, SEQ ID NO: 82, SEQ ID NO: 84, SEQ ID NO: 86, SEQ ID NO: 88, SEQ ID NO: 90, SEQ ID NO: 92, SEQ ID NO: 94, SEQ ID NO: 96, SEQ ID NO: 98, SEQ ID NO: 100, SEQ ID NO: 102, SEQ ID NO: 104, SEQ ID NO: 106, SEQ ID NO: 108, SEQ ID NO: 110, SEQ ID NO: 112, SEQ ID NO: 114, SEQ ID NO: 116, SEQ ID NO: 118, SEQ ID NO: 120, SEQ ID NO: 122, SEQ ID NO: 124, SEQ ID NO: 126, SEQ ID NO: 128, SEQ ID NO: 130, SEQ ID NO: 132, SEQ ID NO: 134, SEQ ID NO: 136, SEQ ID NO: 138, SEQ ID NO: 140, SEQ ID NO: 142, SEQ ID NO: 144, SEQ ID

[0393] NO: 146, SEQ ID NO: 148, SEQ ID NO: 150, SEQ ID NO: 152, SEQ ID NO: 154, SEQ ID NO: 156, SEQ ID NO: 158, SEQ ID NO: 160, SEQ ID NO: 162, SEQ ID NO: 164, SEQ ID NO: 166, SEQ ID NO: 168, SEQ ID NO: 170, SEQ ID NO: 172, SEQ ID NO: 174, SEQ ID NO: 176, SEQ ID NO: 178, or SEQ ID NO: 180; or the CBM33 thereof; (b) a chitin binding protein encoded by a polynucleotide that hybridizes under at least medium-high stringency conditions with the full-length or mature chitin binding protein coding sequence of SEQ ID NO: 1, SEQ ID NO: 3, SEQ ID NO: 5, SEQ ID NO: 7, SEQ ID NO: 9, SEQ ID NO: 11, SEQ ID NO: 13, SEQ ID NO: 15, SEQ ID NO: 17, SEQ ID NO: 19, SEQ ID NO: 21, SEQ ID NO: 23, SEQ ID NO: 25, SEQ ID NO: 27, SEQ ID NO: 29, SEQ ID NO: 31, SEQ ID NO: 33, SEQ ID NO: 35, SEQ ID NO: 37, SEQ ID NO: 39, SEQ ID NO: 41, SEQ ID NO: 43, SEQ ID NO: 45, SEQ ID NO: 47, SEQ ID NO: 49, SEQ ID NO: 51, SEQ ID NO: 53, SEQ ID NO: 55, SEQ ID NO: 57, SEQ ID NO: 59, SEQ ID NO: 61, SEQ ID NO: 63, SEQ ID NO: 65, SEQ ID NO: 67, SEQ ID NO: 69, SEQ ID NO: 71, SEQ ID NO: 73, SEQ ID NO: 75, SEQ ID NO: 77, SEQ ID NO: 79, SEQ ID NO: 81, SEQ ID NO: 83, SEQ ID NO: 85, SEQ ID NO: 87, SEQ ID NO: 89, SEQ ID NO: 91, SEQ ID NO: 93, SEQ ID NO: 95, SEQ ID NO: 97, SEQ ID NO: 99, SEQ ID NO: 101, SEQ ID NO: 103, SEQ ID NO: 105, SEQ ID NO: 107, SEQ ID NO: 109, SEQ ID NO: 111, SEQ ID NO: 113, SEQ ID NO: 115, SEQ ID NO: 117, SEQ ID NO: 119, SEQ ID NO: 121, SEQ ID NO: 123, SEQ ID NO: 125, SEQ ID NO: 127, SEQ ID NO: 129, SEQ ID NO: 131, SEQ ID NO: 133, SEQ ID NO: 135, SEQ ID NO: 137, SEQ ID NO: 139, SEQ ID NO: 141, SEQ ID NO: 143, SEQ ID NO: 145, SEQ ID NO: 147, SEQ ID NO: 149, SEQ ID NO: 151, SEQ ID NO: 153, SEQ ID NO: 155, SEQ ID NO: 157, SEQ ID NO: 159, SEQ ID NO: 161, SEQ ID NO: 163, SEQ ID NO: 165, SEQ ID NO: 167, SEQ ID NO: 169, SEQ ID NO: 171, SEQ ID NO: 173, SEQ ID NO: 175, SEQ ID NO: 177, or SEQ ID NO: 179; the CBM33 coding sequence thereof; or the full-length complement thereof; (c) a chitin binding protein encoded by a polynucleotide having at least 60% sequence identity to the full-length or mature chitin binding protein coding sequence of SEQ ID NO: 1, SEQ ID NO: 3, SEQ ID NO: 5, SEQ ID NO: 7, SEQ ID NO: 9, SEQ ID NO: 11, SEQ ID NO: 13, SEQ ID NO: 15, SEQ ID NO: 17, SEQ ID NO: 19, SEQ ID NO: 21, SEQ ID NO: 23, SEQ ID NO: 25, SEQ ID NO: 27, SEQ ID NO: 29, SEQ ID NO: 31, SEQ ID NO: 33, SEQ ID NO: 35, SEQ ID NO: 37, SEQ ID NO: 39, SEQ ID NO: 41, SEQ ID NO: 43, SEQ ID NO: 45, SEQ ID NO: 47, SEQ ID NO: 49, SEQ ID NO: 51, SEQ ID NO: 53, SEQ ID NO: 55, SEQ ID NO: 57, SEQ ID NO: 59, SEQ ID NO: 61, SEQ ID NO: 63, SEQ ID NO: 65, SEQ ID NO: 67, SEQ ID NO: 69, SEQ ID NO: 71, SEQ ID NO: 73, SEQ ID NO: 75, SEQ ID NO: 77, SEQ ID NO: 79, SEQ ID NO: 81, SEQ ID NO: 83, SEQ ID NO: 85, SEQ ID NO: 87, SEQ ID NO: 89, SEQ ID NO: 91, SEQ ID NO: 93, SEQ ID NO: 95, SEQ ID NO: 97, SEQ ID NO: 99, SEQ ID NO: 101, SEQ ID NO: 103, SEQ ID NO: 105, SEQ ID NO: 107, SEQ ID NO: 109, SEQ ID NO: 111, SEQ ID NO: 113, SEQ ID NO: 115, SEQ ID NO: 117, SEQ ID NO: 119, SEQ ID NO: 121, SEQ ID NO: 123, SEQ ID NO: 125, SEQ ID NO: 127, SEQ ID NO: 129, SEQ ID NO: 131, SEQ ID NO: 133, SEQ ID NO: 135, SEQ ID NO: 137, SEQ ID NO: 139, SEQ ID NO: 141, SEQ ID NO: 143, SEQ ID NO: 145, SEQ ID NO: 147, SEQ ID NO: 149, SEQ ID NO: 151, SEQ ID NO: 153, SEQ ID NO: 155, SEQ ID NO: 157, SEQ ID NO: 159, SEQ ID NO: 161, SEQ ID NO: 163, SEQ ID NO: 165, SEQ ID NO: 167, SEQ ID NO: 169, SEQ ID NO: 171, SEQ ID NO: 173, SEQ ID NO: 175, SEQ ID NO: 177, or SEQ ID NO: 179; or the CBM33 coding sequence thereof; (d) a variant of the mature chitin binding protein of SEQ ID NO: 2, SEQ ID NO: 4, SEQ ID NO: 6, SEQ ID NO: 8, SEQ ID NO: 10, SEQ ID NO: 12, SEQ ID NO: 14, SEQ ID NO: 16, SEQ ID NO: 18, SEQ ID NO: 20, SEQ ID NO: 22, SEQ ID NO: 24, SEQ ID NO: 26, SEQ ID NO: 28, SEQ ID NO: 30, SEQ ID NO: 32, SEQ ID NO: 34, SEQ ID NO: 36, SEQ ID NO: 38, SEQ ID NO: 40, SEQ ID NO: 42, SEQ ID NO: 44, SEQ ID NO: 46, SEQ ID NO: 48, SEQ ID NO: 50, SEQ ID NO: 52, SEQ ID NO: 54, SEQ ID NO: 56, SEQ ID NO: 58, SEQ ID NO: 60, SEQ ID NO: 62, SEQ ID NO: 64, SEQ ID NO: 66, SEQ ID NO: 68, SEQ ID NO: 70, SEQ ID NO: 72, SEQ ID NO: 74, SEQ ID NO: 76, SEQ ID NO: 78, SEQ ID NO: 80, SEQ ID NO: 82, SEQ ID NO: 84, SEQ ID NO: 86, SEQ ID NO: 88, SEQ ID NO: 90, SEQ ID NO: 92, SEQ ID NO: 94, SEQ ID NO: 96, SEQ ID NO: 98, SEQ ID NO: 100, SEQ ID NO: 102, SEQ ID NO: 104, SEQ ID NO: 106, SEQ ID NO: 108, SEQ ID NO: 110, SEQ ID NO: 112, SEQ ID NO: 114, SEQ ID NO: 116, SEQ ID NO: 118, SEQ ID NO: 120, SEQ ID NO: 122, SEQ ID NO: 124, SEQ ID NO: 126, SEQ ID NO: 128, SEQ ID NO: 130, SEQ ID NO: 132, SEQ ID NO: 134, SEQ ID NO: 136, SEQ ID NO: 138, SEQ ID NO: 140, SEQ ID NO: 142, SEQ ID NO: 144, SEQ ID NO: 146, SEQ ID NO: 148, SEQ ID NO: 150, SEQ ID NO: 152, SEQ ID NO: 154, SEQ ID NO: 156, SEQ ID NO: 158, SEQ ID NO: 160, SEQ ID NO: 162, SEQ ID NO: 164, SEQ ID NO: 166, SEQ ID NO: 168, SEQ ID NO: 170, SEQ ID NO: 172, SEQ ID NO: 174, SEQ ID NO: 176, SEQ ID NO: 178, or SEQ ID NO: 180, or the CBM33 coding sequence thereof, comprising a substitution, deletion, and/or insertion at one or more positions; and (e) a fragment of the chitin binding protein of (a), (b), (c), or (d) that has chitin binding activity.

[0394] [3] The method of paragraph 2, wherein the chitin binding protein has at least 60%, at least 65%, at least 70%, at least 75%, at least 80%, at least 81%, at least 82%, at least 83%, at least 84%, at least 85%, at least 86%, at least 87%, at least 88%, at least 89%, at least 90%, at least 91%, at least 92%, at least 93%, at least 94%, at least 95%, at least 96%, at least 97%, at least 98%, at least 99% or 100% sequence identity to the full-length or mature chitin binding protein of SEQ ID NO: 2, SEQ ID NO: 4, SEQ ID NO: 6, SEQ ID NO: 8, SEQ ID NO: 10, SEQ ID NO: 12, SEQ ID NO: 14, SEQ ID NO: 16, SEQ ID NO: 18, SEQ ID NO: 20, SEQ ID NO: 22, SEQ ID NO: 24, SEQ ID NO: 26, SEQ ID NO: 28, SEQ ID NO: 30, SEQ ID NO: 32, SEQ ID NO: 34, SEQ ID NO: 36, SEQ ID NO: 38, SEQ ID NO: 40, SEQ ID NO: 42, SEQ ID NO: 44, SEQ ID NO: 46, SEQ ID NO: 48, SEQ ID NO: 50, SEQ ID NO: 52, SEQ ID NO: 54, SEQ ID NO: 56, SEQ ID NO: 58, SEQ ID NO: 60, SEQ ID NO: 62, SEQ ID NO: 64, SEQ ID NO: 66, SEQ ID NO: 68, SEQ ID NO: 70, SEQ ID NO: 72, SEQ ID NO: 74, SEQ ID NO: 76, SEQ ID NO: 78, SEQ ID NO: 80, SEQ ID NO: 82, SEQ ID NO: 84, SEQ ID NO: 86, SEQ ID NO: 88, SEQ ID NO: 90, SEQ ID NO: 92, SEQ ID NO: 94, SEQ ID NO: 96, SEQ ID NO: 98, SEQ ID NO: 100, SEQ ID NO: 102, SEQ ID NO: 104, SEQ ID NO: 106, SEQ ID NO: 108, SEQ ID NO: 110, SEQ ID NO: 112, SEQ ID NO: 114, SEQ ID NO: 116, SEQ ID NO: 118, SEQ ID NO: 120, SEQ ID NO: 122, SEQ ID NO: 124, SEQ ID NO: 126, SEQ ID NO: 128, SEQ ID NO: 130, SEQ ID NO: 132, SEQ ID NO: 134, SEQ ID NO: 136, SEQ ID NO: 138, SEQ ID NO: 140, SEQ ID NO: 142, SEQ ID NO: 144, SEQ ID NO: 146, SEQ ID NO: 148, SEQ ID NO: 150, SEQ ID NO: 152, SEQ ID NO: 154, SEQ ID NO: 156, SEQ ID NO: 158, SEQ ID NO: 160, SEQ ID NO: 162, SEQ ID NO: 164, SEQ ID NO: 166, SEQ ID NO: 168, SEQ ID NO: 170, SEQ ID NO: 172, SEQ ID NO: 174, SEQ ID NO: 176, SEQ ID NO: 178, or SEQ ID NO: 180; or the CBM33 thereof.

[0395] [4] The method of paragraph 2, wherein the chitin binding protein is encoded by a polynucleotide that hybridizes under medium-high stringency conditions, high stringency conditions, or very high stringency conditions with the full-length or mature chitin binding protein coding sequence of SEQ ID NO: 1, SEQ ID NO: 3, SEQ ID NO: 5, SEQ ID NO: 7, SEQ ID NO: 9, SEQ ID NO: 11, SEQ ID NO: 13, SEQ ID NO: 15, SEQ ID NO: 17, SEQ ID NO: 19, SEQ ID NO: 21, SEQ ID NO: 23, SEQ ID NO: 25, SEQ ID NO: 27, SEQ ID NO: 29, SEQ ID NO: 31, SEQ ID NO: 33, SEQ ID NO: 35, SEQ ID NO: 37, SEQ ID NO: 39, SEQ ID NO: 41, SEQ ID NO: 43, SEQ ID NO: 45, SEQ ID NO: 47, SEQ ID NO: 49, SEQ ID NO: 51, SEQ ID NO: 53, SEQ ID NO: 55, SEQ ID NO: 57, SEQ ID NO: 59, SEQ ID NO: 61, SEQ ID NO: 63, SEQ ID NO: 65, SEQ ID NO: 67, SEQ ID NO: 69, SEQ ID NO: 71, SEQ ID NO: 73, SEQ ID NO: 75, SEQ ID NO: 77, SEQ ID NO: 79, SEQ ID NO: 81, SEQ ID NO: 83, SEQ ID NO: 85, SEQ ID NO: 87, SEQ ID NO: 89, SEQ ID NO: 91, SEQ ID NO: 93, SEQ ID NO: 95, SEQ ID NO: 97, SEQ ID NO: 99, SEQ ID NO: 101, SEQ ID NO: 103, SEQ ID NO: 105, SEQ ID NO: 107, SEQ ID NO: 109, SEQ ID NO: 111, SEQ ID NO: 113, SEQ ID NO: 115, SEQ ID NO: 117, SEQ ID NO: 119, SEQ ID NO: 121, SEQ ID NO: 123, SEQ ID NO: 125, SEQ ID NO: 127, SEQ ID NO: 129, SEQ ID NO: 131, SEQ ID NO: 133, SEQ ID NO: 135, SEQ ID NO: 137, SEQ ID NO: 139, SEQ ID NO: 141, SEQ ID NO: 143, SEQ ID NO: 145, SEQ ID NO: 147, SEQ ID NO: 149, SEQ ID NO: 151, SEQ ID NO: 153, SEQ ID NO: 155, SEQ ID NO: 157, SEQ ID NO: 159, SEQ ID NO: 161, SEQ ID NO: 163, SEQ ID NO: 165, SEQ ID NO: 167, SEQ ID NO: 169, SEQ ID NO: 171, SEQ ID NO: 173, SEQ ID NO: 175, SEQ ID NO: 177, or SEQ ID NO: 179; the CBM33 coding sequence thereof; or the full-length complement thereof.

[0396] [5] The method of paragraph 2, wherein the chitin binding protein is encoded by a polynucleotide having at least 60%, at least 65%, at least 70%, at least 75%, at least 80%, at least 81%, at least 82%, at least 83%, at least 84%, at least 85%, at least 86%, at least 87%, at least 88%, at least 89%, at least 90%, at least 91%, at least 92%, at least 93%, at least 94%, at least 95%, at least 96%, at least 97%, at least 98%, at least 99% or 100% sequence identity to the full-length or mature chitin binding protein coding sequence of SEQ ID NO: 1, SEQ ID NO: 3, SEQ ID NO: 5, SEQ ID NO: 7, SEQ ID NO: 9, SEQ ID NO: 11, SEQ ID NO: 13, SEQ ID NO: 15, SEQ ID NO: 17, SEQ ID NO: 19, SEQ ID NO: 21, SEQ ID NO: 23, SEQ ID NO: 25, SEQ ID NO: 27, SEQ ID NO: 29, SEQ ID NO: 31, SEQ ID NO: 33, SEQ ID NO: 35, SEQ ID NO: 37, SEQ ID NO: 39, SEQ ID NO: 41, SEQ ID NO: 43, SEQ ID NO: 45, SEQ ID NO: 47, SEQ ID NO: 49, SEQ ID NO: 51, SEQ ID NO: 53, SEQ ID NO: 55, SEQ ID NO: 57, SEQ ID NO: 59, SEQ ID NO: 61, SEQ ID NO: 63, SEQ ID NO: 65, SEQ ID NO: 67, SEQ ID NO: 69, SEQ ID NO: 71, SEQ ID NO: 73, SEQ ID NO: 75, SEQ ID NO: 77, SEQ ID NO: 79, SEQ ID NO: 81, SEQ ID NO: 83, SEQ ID NO: 85, SEQ ID NO: 87, SEQ ID NO: 89, SEQ ID NO: 91, SEQ ID NO: 93, SEQ ID NO: 95, SEQ ID NO: 97, SEQ ID NO: 99, SEQ ID NO: 101, SEQ ID NO: 103, SEQ ID NO: 105, SEQ ID NO: 107, SEQ ID NO: 109, SEQ ID NO: 111, SEQ ID NO: 113, SEQ ID NO: 115, SEQ ID NO: 117, SEQ ID NO: 119, SEQ ID NO: 121, SEQ ID NO: 123, SEQ ID NO: 125, SEQ ID NO: 127, SEQ ID NO: 129, SEQ ID NO: 131, SEQ ID NO: 133, SEQ ID NO: 135, SEQ ID NO: 137, SEQ ID NO: 139, SEQ ID NO: 141, SEQ ID NO: 143, SEQ ID NO: 145, SEQ ID NO: 147, SEQ ID NO: 149, SEQ ID NO: 151, SEQ ID NO: 153, SEQ ID NO: 155, SEQ ID NO: 157, SEQ ID NO: 159, SEQ ID NO: 161, SEQ ID NO: 163, SEQ ID NO: 165, SEQ ID NO: 167, SEQ ID NO: 169, SEQ ID NO: 171, SEQ ID NO: 173, SEQ ID NO: 175, SEQ ID NO: 177, or SEQ ID NO: 179; or the CBM33 coding sequence thereof.

[0397] [6] The method of paragraph 2, wherein the chitin binding protein comprises or consists of SEQ ID NO: 2, SEQ ID NO: 4, SEQ ID NO: 6, SEQ ID NO: 8, SEQ ID NO: 10, SEQ ID NO: 12, SEQ ID NO: 14, SEQ ID NO: 16, SEQ ID NO: 18, SEQ ID NO: 20, SEQ ID NO: 22, SEQ ID NO: 24, SEQ ID NO: 26, SEQ ID NO: 28, SEQ ID NO: 30, SEQ ID NO: 32, SEQ ID NO: 34, SEQ ID NO: 36, SEQ ID NO: 38, SEQ ID NO: 40, SEQ ID NO: 42, SEQ ID NO: 44, SEQ ID NO: 46, SEQ ID NO: 48, SEQ ID NO: 50, SEQ ID NO: 52, SEQ ID NO: 54, SEQ ID NO: 56, SEQ ID NO: 58, SEQ ID NO: 60, SEQ ID NO: 62, SEQ ID NO: 64, SEQ ID NO: 66, SEQ ID NO: 68, SEQ ID NO: 70, SEQ ID NO: 72, SEQ ID NO: 74, SEQ ID NO: 76, SEQ ID NO: 78, SEQ ID NO: 80, SEQ ID NO: 82, SEQ ID NO: 84, SEQ ID NO: 86, SEQ ID NO: 88, SEQ ID NO: 90, SEQ ID NO: 92, SEQ ID NO: 94, SEQ ID NO: 96, SEQ ID NO: 98, SEQ ID NO: 100, SEQ ID NO: 102, SEQ ID NO: 104, SEQ ID NO: 106, SEQ ID NO: 108, SEQ ID NO: 110, SEQ ID NO: 112, SEQ ID NO: 114, SEQ ID NO: 116, SEQ ID NO: 118, SEQ ID NO: 120, SEQ ID NO: 122, SEQ ID NO: 124, SEQ ID NO: 126, SEQ ID NO: 128, SEQ ID NO: 130, SEQ ID NO: 132, SEQ ID NO: 134, SEQ ID NO: 136, SEQ ID NO: 138, SEQ ID NO: 140, SEQ ID NO: 142, SEQ ID NO: 144, SEQ ID NO: 146, SEQ ID NO: 148, SEQ ID NO: 150, SEQ ID NO: 152, SEQ ID NO: 154, SEQ ID NO: 156, SEQ ID NO: 158, SEQ ID NO: 160, SEQ ID NO: 162, SEQ ID NO: 164, SEQ ID NO: 166, SEQ ID NO: 168, SEQ ID NO: 170, SEQ ID NO: 172, SEQ ID NO: 174, SEQ ID NO: 176, SEQ ID NO: 178, or SEQ ID NO: 180; or the CBM33 thereof.

[0398] [7] The method of paragraph 2, wherein the chitin binding protein comprises or consists of the mature chitin binding protein of SEQ ID NO: 2, SEQ ID NO: 4, SEQ ID NO: 6, SEQ ID NO: 8, SEQ ID NO: 10, SEQ ID NO: 12, SEQ ID NO: 14, SEQ ID NO: 16, SEQ ID NO: 18, SEQ ID NO: 20, SEQ ID NO: 22, SEQ ID NO: 24, SEQ ID NO: 26, SEQ ID NO: 28, SEQ ID NO: 30, SEQ ID NO: 32, SEQ ID NO: 34, SEQ ID NO: 36, SEQ ID NO: 38, SEQ ID NO: 40, SEQ ID NO: 42, SEQ ID NO: 44, SEQ ID NO: 46, SEQ ID NO: 48, SEQ ID NO: 50, SEQ ID NO: 52, SEQ ID NO: 54, SEQ ID NO: 56, SEQ ID NO: 58, SEQ ID NO: 60, SEQ ID NO: 62, SEQ ID NO: 64, SEQ ID NO: 66, SEQ ID NO: 68, SEQ ID NO: 70, SEQ ID NO: 72, SEQ ID NO: 74, SEQ ID NO: 76, SEQ ID NO: 78, SEQ ID NO: 80, SEQ ID NO: 82, SEQ ID NO: 84, SEQ ID NO: 86, SEQ ID NO: 88, SEQ ID NO: 90, SEQ ID NO: 92, SEQ ID NO: 94, SEQ ID NO: 96, SEQ ID NO: 98, SEQ ID NO: 100, SEQ ID NO: 102, SEQ ID NO: 104, SEQ ID NO: 106, SEQ ID NO: 108, SEQ ID NO: 110, SEQ ID NO: 112, SEQ ID NO: 114, SEQ ID NO: 116, SEQ ID NO: 118, SEQ ID NO: 120, SEQ ID NO: 122, SEQ ID NO: 124, SEQ ID NO: 126, SEQ ID NO: 128, SEQ ID NO: 130, SEQ ID NO: 132, SEQ ID NO: 134, SEQ ID NO: 136, SEQ ID NO: 138, SEQ ID NO: 140, SEQ ID NO: 142, SEQ ID NO: 144, SEQ ID NO: 146, SEQ ID NO: 148, SEQ ID NO: 150, SEQ ID NO: 152, SEQ ID NO: 154, SEQ ID NO: 156, SEQ ID NO: 158, SEQ ID NO: 160, SEQ ID NO: 162, SEQ ID NO: 164, SEQ ID NO: 166, SEQ ID NO: 168, SEQ ID NO: 170, SEQ ID NO: 172, SEQ ID NO: 174, SEQ ID NO: 176, SEQ ID NO: 178, or SEQ ID NO: 180; or the CBM33 thereof.

[0399] [8] The method of paragraph 2, wherein the chitin binding protein is a variant of the mature chitin binding protein of SEQ ID NO: 2, SEQ ID NO: 4, SEQ ID NO: 6, SEQ ID NO: 8, SEQ ID NO: 10, SEQ ID NO: 12, SEQ ID NO: 14, SEQ ID NO: 16, SEQ ID NO: 18, SEQ ID NO: 20, SEQ ID NO: 22, SEQ ID NO: 24, SEQ ID NO: 26, SEQ ID NO: 28, SEQ ID NO: 30, SEQ ID NO: 32, SEQ ID NO: 34, SEQ ID NO: 36, SEQ ID NO: 38, SEQ ID NO: 40, SEQ ID NO: 42, SEQ ID NO: 44, SEQ ID NO: 46, SEQ ID NO: 48, SEQ ID NO: 50, SEQ ID NO: 52, SEQ ID NO: 54, SEQ ID NO: 56, SEQ ID NO: 58, SEQ ID NO: 60, SEQ ID NO: 62, SEQ ID NO: 64, SEQ ID NO: 66, SEQ ID NO: 68, SEQ ID NO: 70, SEQ ID NO: 72, SEQ ID NO: 74, SEQ ID NO: 76, SEQ ID NO: 78, SEQ ID NO: 80, SEQ ID NO: 82, SEQ ID NO: 84, SEQ ID NO: 86, SEQ ID NO: 88, SEQ ID NO: 90, SEQ ID NO: 92, SEQ ID NO: 94, SEQ ID NO: 96, SEQ ID NO: 98, SEQ ID NO: 100, SEQ ID NO: 102, SEQ ID NO: 104, SEQ ID NO: 106, SEQ ID NO: 108, SEQ ID NO: 110, SEQ ID NO: 112, SEQ ID NO: 114, SEQ ID NO: 116, SEQ ID NO: 118, SEQ ID NO: 120, SEQ ID NO: 122, SEQ ID NO: 124, SEQ ID NO: 126, SEQ ID NO: 128, SEQ ID NO: 130, SEQ ID NO: 132, SEQ ID NO: 134, SEQ ID NO: 136, SEQ ID NO: 138, SEQ ID NO: 140, SEQ ID NO: 142, SEQ ID NO: 144, SEQ ID NO: 146, SEQ ID NO: 148, SEQ ID NO: 150, SEQ ID NO: 152, SEQ ID NO: 154, SEQ ID NO: 156, SEQ ID NO: 158, SEQ ID NO: 160, SEQ ID NO: 162, SEQ ID NO: 164, SEQ ID NO: 166, SEQ ID NO: 168, SEQ ID NO: 170, SEQ ID NO: 172, SEQ ID NO: 174, SEQ ID NO: 176, SEQ ID NO: 178, or SEQ ID NO: 180, or the CBM33 thereof, comprising a substitution, deletion, and/or insertion at one or more positions.

[0400] [9] The method of paragraph 2, wherein the chitin binding protein is a fragment of SEQ ID NO: 2, SEQ ID NO: 4, SEQ ID NO: 6, SEQ ID NO: 8, SEQ ID NO: 10, SEQ ID NO: 12, SEQ ID NO: 14, SEQ ID NO: 16, SEQ ID NO: 18, SEQ ID NO: 20, SEQ ID NO: 22, SEQ ID NO: 24, SEQ ID NO: 26, SEQ ID NO: 28, SEQ ID NO: 30, SEQ ID NO: 32, SEQ ID NO: 34, SEQ ID NO: 36, SEQ ID NO: 38, SEQ ID NO: 40, SEQ ID NO: 42, SEQ ID NO: 44, SEQ ID NO: 46, SEQ ID NO: 48, SEQ ID NO: 50, SEQ ID NO: 52, SEQ ID NO: 54, SEQ ID NO: 56, SEQ ID NO: 58, SEQ ID NO: 60, SEQ ID NO: 62, SEQ ID NO: 64, SEQ ID NO: 66, SEQ ID NO: 68, SEQ ID NO: 70, SEQ ID NO: 72, SEQ ID NO: 74, SEQ ID NO: 76, SEQ ID NO: 78, SEQ ID NO: 80, SEQ ID NO: 82, SEQ ID NO: 84, SEQ ID NO: 86, SEQ ID NO: 88, SEQ ID NO: 90, SEQ ID NO: 92, SEQ ID NO: 94, SEQ ID NO: 96, SEQ ID NO: 98, SEQ ID NO: 100, SEQ ID NO: 102, SEQ ID NO: 104, SEQ ID NO: 106, SEQ ID NO: 108, SEQ ID NO: 110, SEQ ID NO: 112, SEQ ID NO: 114, SEQ ID NO: 116, SEQ ID NO: 118, SEQ ID NO: 120, SEQ ID NO: 122, SEQ ID NO: 124, SEQ ID NO: 126, SEQ ID NO: 128, SEQ ID NO: 130, SEQ ID NO: 132, SEQ ID NO: 134, SEQ ID NO: 136, SEQ ID NO: 138, SEQ ID NO: 140, SEQ ID NO: 142, SEQ ID NO: 144, SEQ ID NO: 146, SEQ ID NO: 148, SEQ ID NO: 150, SEQ ID NO: 152, SEQ ID NO: 154, SEQ ID NO: 156, SEQ ID NO: 158, SEQ ID NO: 160, SEQ ID NO: 162, SEQ ID NO: 164, SEQ ID NO: 166, SEQ ID NO: 168, SEQ ID NO: 170, SEQ ID NO: 172, SEQ ID NO: 174, SEQ ID NO: 176, SEQ ID NO: 178, or SEQ ID NO: 180; or the CBM33 thereof; wherein the fragment has chitin binding activity.

[0401] [10] The method of any of paragraphs 1-9, wherein the cellulosic material is pretreated.

[0402] [11] The method of any of paragraphs 1-10, wherein the cellulosic material is treated with the enzyme composition in the presence of the chitin binding protein and a GH61 polypeptide having cellulolytic enhancing activity.

[0403] [12] The method of any of paragraphs 1-11, wherein the enzyme composition comprises one or more enzymes selected from the group consisting of a cellulase, a GH61 polypeptide, a hemicellulase, an esterase, an expansin, a laccase, a ligninolytic enzyme, a pectinase, a peroxidase, a protease, and a swollenin.

[0404] [13] The method of paragraph 12, wherein the cellulase is one or more enzymes selected from the group consisting of an endoglucanase, a cellobiohydrolase, and a beta-glucosidase.

[0405] [14] The method of paragraph 12, wherein the hemicellulase is one or more enzymes selected from the group consisting of a xylanase, an acetylxylan esterase, a feruloyl esterase, an arabinofuranosidase, a xylosidase, and a glucuronidase.

[0406] [15] The method of any of paragraphs 1-14, further comprising recovering the degraded cellulosic material.

[0407] [16] The method of paragraph 15, wherein the degraded cellulosic material is a sugar.

[0408] [17] The method of paragraph 16, wherein the sugar is selected from the group consisting of glucose, xylose, mannose, galactose, and arabinose.

[0409] [18] The method of any of paragraphs 1-17, wherein the enzyme composition and/or the chitin binding protein are in the form of a fermentation broth with or without cells.

[0410] [19] A method for producing a fermentation product, comprising: (a) saccharifying a cellulosic material with an enzyme composition in the presence of a chitin binding protein; (b) fermenting the saccharified cellulosic material with one or more fermenting microorganisms to produce the fermentation product; and (c) recovering the fermentation product from the fermentation.

[0411] [20] The method of paragraph 19, wherein the chitin binding protein is selected from the group consisting of: (a) a chitin binding protein having at least 60% sequence identity to the full-length or mature chitin binding protein of SEQ ID NO: 2, SEQ ID NO: 4, SEQ ID NO: 6, SEQ ID NO: 8, SEQ ID NO: 10, SEQ ID NO: 12, SEQ ID NO: 14, SEQ ID NO: 16, SEQ ID NO: 18, SEQ ID NO: 20, SEQ ID NO: 22, SEQ ID NO: 24, SEQ ID NO: 26, SEQ ID NO: 28, SEQ ID NO: 30, SEQ ID NO: 32, SEQ ID NO: 34, SEQ ID NO: 36, SEQ ID NO: 38, SEQ ID NO: 40, SEQ ID NO: 42, SEQ ID NO: 44, SEQ ID NO: 46, SEQ ID NO: 48, SEQ ID NO: 50, SEQ ID NO: 52, SEQ ID NO: 54, SEQ ID NO: 56, SEQ ID NO: 58, SEQ ID NO: 60, SEQ ID NO: 62, SEQ ID NO: 64, SEQ ID NO: 66, SEQ ID NO: 68, SEQ ID NO: 70, SEQ ID NO: 72, SEQ ID NO: 74, SEQ ID NO: 76, SEQ ID NO: 78, SEQ ID NO: 80, SEQ ID NO: 82, SEQ ID NO: 84, SEQ ID NO: 86, SEQ ID NO: 88, SEQ ID NO: 90, SEQ ID NO: 92, SEQ ID NO: 94, SEQ ID NO: 96, SEQ ID NO: 98, SEQ ID NO: 100, SEQ ID NO: 102, SEQ ID NO: 104, SEQ ID NO: 106, SEQ ID NO: 108, SEQ ID NO: 110, SEQ ID NO: 112, SEQ ID NO: 114, SEQ ID NO: 116, SEQ ID NO: 118, SEQ ID NO: 120, SEQ ID NO: 122, SEQ ID NO: 124, SEQ ID NO: 126, SEQ ID NO: 128, SEQ ID NO: 130, SEQ ID NO: 132, SEQ ID NO: 134, SEQ ID NO: 136, SEQ ID NO: 138, SEQ ID NO: 140, SEQ ID NO: 142, SEQ ID NO: 144, SEQ ID NO: 146, SEQ ID NO: 148, SEQ ID NO: 150, SEQ ID NO: 152, SEQ ID NO: 154, SEQ ID NO: 156, SEQ ID NO: 158, SEQ ID NO: 160, SEQ ID NO: 162, SEQ ID NO: 164, SEQ ID NO: 166, SEQ ID NO: 168, SEQ ID NO: 170, SEQ ID NO: 172, SEQ ID NO: 174, SEQ ID NO: 176, SEQ ID NO: 178, or SEQ ID NO: 180; or the CBM33 thereof; (b) a chitin binding protein encoded by a polynucleotide that hybridizes under at least medium-high stringency conditions with the full-length or mature chitin binding protein coding sequence of SEQ ID NO: 1, SEQ ID NO: 3, SEQ ID NO: 5, SEQ ID NO: 7, SEQ ID NO: 9, SEQ ID NO: 11, SEQ ID NO: 13, SEQ ID NO: 15, SEQ ID NO: 17, SEQ ID NO: 19, SEQ ID NO: 21, SEQ ID NO: 23, SEQ ID NO: 25, SEQ ID NO: 27, SEQ ID NO: 29, SEQ ID NO: 31, SEQ ID NO: 33, SEQ ID NO: 35, SEQ ID NO: 37, SEQ ID NO: 39, SEQ ID NO: 41, SEQ ID NO: 43, SEQ ID NO: 45, SEQ ID NO: 47, SEQ ID NO: 49, SEQ ID NO: 51, SEQ ID NO: 53, SEQ ID NO: 55, SEQ ID NO: 57, SEQ ID NO: 59, SEQ ID NO: 61, SEQ ID NO: 63, SEQ ID NO: 65, SEQ ID NO: 67, SEQ ID NO: 69, SEQ ID NO: 71, SEQ ID NO: 73, SEQ ID NO: 75, SEQ ID NO: 77, SEQ ID NO: 79, SEQ ID NO: 81, SEQ ID NO: 83, SEQ ID NO: 85, SEQ ID NO: 87, SEQ ID NO: 89, SEQ ID NO: 91, SEQ ID NO: 93, SEQ ID NO: 95, SEQ ID NO: 97, SEQ ID NO: 99, SEQ ID NO: 101, SEQ ID NO: 103, SEQ ID NO: 105, SEQ ID NO: 107, SEQ ID NO: 109, SEQ ID NO: 111, SEQ ID NO: 113, SEQ ID NO: 115, SEQ ID NO: 117, SEQ ID NO: 119, SEQ ID NO: 121, SEQ ID NO: 123, SEQ ID NO: 125, SEQ ID NO: 127, SEQ ID NO: 129, SEQ ID NO: 131, SEQ ID NO: 133, SEQ ID NO: 135, SEQ ID NO: 137, SEQ ID NO: 139, SEQ ID NO: 141, SEQ ID NO: 143, SEQ ID NO: 145, SEQ ID NO: 147, SEQ ID NO: 149, SEQ ID NO: 151, SEQ ID NO: 153, SEQ ID NO: 155, SEQ ID NO: 157, SEQ ID NO: 159, SEQ ID NO: 161, SEQ ID NO: 163, SEQ ID NO: 165, SEQ ID NO: 167, SEQ ID NO: 169, SEQ ID NO: 171, SEQ ID NO: 173, SEQ ID NO: 175, SEQ ID NO: 177, or SEQ ID NO: 179; the CBM33 coding sequence thereof; or the full-length complement thereof; (c) a chitin binding protein encoded by a polynucleotide having at least 60% sequence identity to the full-length or mature chitin binding protein coding sequence of SEQ ID NO: 1, SEQ ID NO: 3, SEQ ID NO: 5, SEQ ID NO: 7, SEQ ID NO: 9, SEQ ID NO: 11, SEQ ID NO: 13, SEQ ID NO: 15, SEQ ID NO: 17, SEQ ID NO: 19, SEQ ID NO: 21, SEQ ID NO: 23, SEQ ID NO: 25, SEQ ID NO: 27, SEQ ID NO: 29, SEQ ID NO: 31, SEQ ID NO: 33, SEQ ID NO: 35, SEQ ID NO: 37, SEQ ID NO: 39, SEQ ID NO: 41, SEQ ID NO: 43, SEQ ID NO: 45, SEQ ID NO: 47, SEQ ID NO: 49, SEQ ID NO: 51, SEQ ID NO: 53, SEQ ID NO: 55, SEQ ID NO: 57, SEQ ID NO: 59, SEQ ID NO: 61, SEQ ID NO: 63, SEQ ID NO: 65, SEQ ID NO: 67, SEQ ID NO: 69, SEQ ID NO: 71, SEQ ID NO: 73, SEQ ID NO: 75, SEQ ID NO: 77, SEQ ID NO: 79, SEQ ID NO: 81, SEQ ID NO: 83, SEQ ID NO: 85, SEQ ID NO: 87, SEQ ID NO: 89, SEQ ID NO: 91, SEQ ID NO: 93, SEQ ID NO: 95, SEQ ID NO: 97, SEQ ID NO: 99, SEQ ID NO: 101, SEQ ID NO: 103, SEQ ID NO: 105, SEQ ID NO: 107, SEQ ID NO: 109, SEQ ID NO: 111, SEQ ID NO: 113, SEQ ID NO: 115, SEQ ID NO: 117, SEQ ID NO: 119, SEQ ID NO: 121, SEQ ID NO: 123, SEQ ID NO: 125, SEQ ID NO: 127, SEQ ID NO: 129, SEQ ID NO: 131, SEQ ID NO: 133, SEQ ID NO: 135, SEQ ID NO: 137, SEQ ID NO: 139, SEQ ID NO: 141, SEQ ID NO: 143, SEQ ID NO: 145, SEQ ID NO: 147, SEQ ID NO: 149, SEQ ID NO: 151, SEQ ID NO: 153, SEQ ID NO: 155, SEQ ID NO: 157, SEQ ID NO: 159, SEQ ID NO: 161, SEQ ID NO: 163, SEQ ID NO: 165, SEQ ID NO: 167, SEQ ID NO: 169, SEQ ID NO: 171, SEQ ID NO: 173, SEQ ID NO: 175, SEQ ID NO: 177, or SEQ ID NO: 179; or the CBM33 coding sequence thereof; (d) a variant of the mature chitin binding protein of SEQ ID NO: 2, SEQ ID NO: 4, SEQ ID NO: 6, SEQ ID NO: 8, SEQ ID NO: 10, SEQ ID NO: 12, SEQ ID NO: 14, SEQ ID NO: 16, SEQ ID NO: 18, SEQ ID NO: 20, SEQ ID NO: 22, SEQ ID NO: 24, SEQ ID NO: 26, SEQ ID NO: 28, SEQ ID NO: 30, SEQ ID NO: 32, SEQ ID NO: 34, SEQ ID NO: 36, SEQ ID NO: 38, SEQ ID NO: 40, SEQ ID NO: 42, SEQ ID NO: 44, SEQ ID NO: 46, SEQ ID NO: 48, SEQ ID NO: 50, SEQ ID NO: 52, SEQ ID NO: 54, SEQ ID NO: 56, SEQ ID NO: 58, SEQ ID NO: 60, SEQ ID NO: 62, SEQ ID NO: 64, SEQ ID NO: 66, SEQ ID NO: 68, SEQ ID NO: 70, SEQ ID NO: 72, SEQ ID NO: 74, SEQ ID NO: 76, SEQ ID NO: 78, SEQ ID NO: 80, SEQ ID NO: 82, SEQ ID NO: 84, SEQ ID NO: 86, SEQ ID NO: 88, SEQ ID NO: 90, SEQ ID NO: 92, SEQ ID NO: 94, SEQ ID NO: 96, SEQ ID NO: 98, SEQ ID NO: 100, SEQ ID NO: 102, SEQ ID NO: 104, SEQ ID NO: 106, SEQ ID NO: 108, SEQ ID NO: 110, SEQ ID NO: 112, SEQ ID NO: 114, SEQ ID NO: 116, SEQ ID NO: 118, SEQ ID NO: 120, SEQ ID NO: 122, SEQ ID NO: 124, SEQ ID NO: 126, SEQ ID NO: 128, SEQ ID NO: 130, SEQ ID NO: 132, SEQ ID NO: 134, SEQ ID NO: 136, SEQ ID NO: 138, SEQ ID NO: 140, SEQ ID NO: 142, SEQ ID NO: 144, SEQ ID NO: 146, SEQ ID NO: 148, SEQ ID NO: 150, SEQ ID NO: 152, SEQ ID NO: 154, SEQ ID NO: 156, SEQ ID NO: 158, SEQ ID NO: 160, SEQ ID NO: 162, SEQ ID NO: 164, SEQ ID NO: 166, SEQ ID NO: 168, SEQ ID NO: 170, SEQ ID NO: 172, SEQ ID NO: 174, SEQ ID NO: 176, SEQ ID NO: 178, or SEQ ID NO: 180, or the CBM33 thereof, comprising a substitution, deletion, and/or insertion at one or more positions; and (e) a fragment of the chitin binding protein of (a), (b), (c), or (d) that has chitin binding activity.

[0412] [21] The method of paragraph 20, wherein the chitin binding protein has at least 60%, at least 65%, at least 70%, at least 75%, at least 80%, at least 81%, at least 82%, at least 83%, at least 84%, at least 85%, at least 86%, at least 87%, at least 88%, at least 89%, at least 90%, at least 91%, at least 92%, at least 93%, at least 94%, at least 95%, at least 96%, at least 97%, at least 98%, at least 99% or 100% sequence identity to the full-length or mature chitin binding protein of SEQ ID NO: 2, SEQ ID NO: 4, SEQ ID NO: 6, SEQ ID NO: 8, SEQ ID NO: 10, SEQ ID NO: 12, SEQ ID NO: 14, SEQ ID NO: 16, SEQ ID NO: 18, SEQ ID NO: 20, SEQ ID NO: 22, SEQ ID NO: 24, SEQ ID NO: 26, SEQ ID NO: 28, SEQ ID NO: 30, SEQ ID NO: 32, SEQ ID NO: 34, SEQ ID NO: 36, SEQ ID NO: 38, SEQ ID NO: 40, SEQ ID NO: 42, SEQ ID NO: 44, SEQ ID NO: 46, SEQ ID NO: 48, SEQ ID NO: 50, SEQ ID NO: 52, SEQ ID NO: 54, SEQ ID NO: 56, SEQ ID NO: 58, SEQ ID NO: 60, SEQ ID NO: 62, SEQ ID NO: 64, SEQ ID NO: 66, SEQ ID NO: 68, SEQ ID NO: 70, SEQ ID NO: 72, SEQ ID NO: 74, SEQ ID NO: 76, SEQ ID NO: 78, SEQ ID NO: 80, SEQ ID NO: 82, SEQ ID NO: 84, SEQ ID NO: 86, SEQ ID NO: 88, SEQ ID NO: 90, SEQ ID NO: 92, SEQ ID NO: 94, SEQ ID NO: 96, SEQ ID NO: 98, SEQ ID NO: 100, SEQ ID NO: 102, SEQ ID NO: 104, SEQ ID NO: 106, SEQ ID NO: 108, SEQ ID NO: 110, SEQ ID NO: 112, SEQ ID NO: 114, SEQ ID NO: 116, SEQ ID NO: 118, SEQ ID NO: 120, SEQ ID NO: 122, SEQ ID NO: 124, SEQ ID NO: 126, SEQ ID NO: 128, SEQ ID NO: 130, SEQ ID NO: 132, SEQ ID NO: 134, SEQ ID NO: 136, SEQ ID NO: 138, SEQ ID NO: 140, SEQ ID NO: 142, SEQ ID NO: 144, SEQ ID NO: 146, SEQ ID NO: 148, SEQ ID NO: 150, SEQ ID NO: 152, SEQ ID NO: 154, SEQ ID NO: 156, SEQ ID NO: 158, SEQ ID NO: 160, SEQ ID NO: 162, SEQ ID NO: 164, SEQ ID NO: 166, SEQ ID NO: 168, SEQ ID NO: 170, SEQ ID NO: 172, SEQ ID NO: 174, SEQ ID NO: 176, SEQ ID NO: 178, or SEQ ID NO: 180; or the CBM33 thereof.

[0413] [22] The method of paragraph 20, wherein the chitin binding protein is encoded by a polynucleotide that hybridizes under medium-high stringency conditions, high stringency conditions, or very high stringency conditions with the full-length or mature chitin binding protein coding sequence of SEQ ID NO: 1, SEQ ID NO: 3, SEQ ID NO: 5, SEQ ID NO: 7, SEQ ID NO: 9, SEQ ID NO: 11, SEQ ID NO: 13, SEQ ID NO: 15, SEQ ID NO: 17, SEQ ID NO: 19, SEQ ID NO: 21, SEQ ID NO: 23, SEQ ID NO: 25, SEQ ID NO: 27, SEQ ID NO: 29, SEQ ID NO: 31, SEQ ID NO: 33, SEQ ID NO: 35, SEQ ID NO: 37, SEQ ID NO: 39, SEQ ID NO: 41, SEQ ID NO: 43, SEQ ID NO: 45, SEQ ID NO: 47, SEQ ID NO: 49, SEQ ID NO: 51, SEQ ID NO: 53, SEQ ID NO: 55, SEQ ID NO: 57, SEQ ID NO: 59, SEQ ID NO: 61, SEQ ID NO: 63, SEQ ID NO: 65, SEQ ID NO: 67, SEQ ID NO: 69, SEQ ID NO: 71, SEQ ID NO: 73, SEQ ID NO: 75, SEQ ID NO: 77, SEQ ID NO: 79, SEQ ID NO: 81, SEQ ID NO: 83, SEQ ID NO: 85, SEQ ID NO: 87, SEQ ID NO: 89, SEQ ID NO: 91, SEQ ID NO: 93, SEQ ID NO: 95, SEQ ID NO: 97, SEQ ID NO: 99, SEQ ID NO: 101, SEQ ID NO: 103, SEQ ID NO: 105, SEQ ID NO: 107, SEQ ID NO: 109, SEQ ID NO: 111, SEQ ID NO: 113, SEQ ID NO: 115, SEQ ID NO: 117, SEQ ID NO: 119, SEQ ID NO: 121, SEQ ID NO: 123, SEQ ID NO: 125, SEQ ID NO: 127, SEQ ID NO: 129, SEQ ID NO: 131, SEQ ID NO: 133, SEQ ID NO: 135, SEQ ID NO: 137, SEQ ID NO: 139, SEQ ID NO: 141, SEQ ID NO: 143, SEQ ID NO: 145, SEQ ID NO: 147, SEQ ID NO: 149, SEQ ID NO: 151, SEQ ID NO: 153, SEQ ID NO: 155, SEQ ID NO: 157, SEQ ID NO: 159, SEQ ID NO: 161, SEQ ID NO: 163, SEQ ID NO: 165, SEQ ID NO: 167, SEQ ID NO: 169, SEQ ID NO: 171, SEQ ID NO: 173, SEQ ID NO: 175, SEQ ID NO: 177, or SEQ ID NO: 179; the CBM33 coding sequence thereof; or the full-length complement thereof.

[0414] [23] The method of paragraph 20, wherein the chitin binding protein is encoded by a polynucleotide having at least 60%, at least 65%, at least 70%, at least 75%, at least 80%, at least 81%, at least 82%, at least 83%, at least 84%, at least 85%, at least 86%, at least 87%, at least 88%, at least 89%, at least 90%, at least 91%, at least 92%, at least 93%, at least 94%, at least 95%, at least 96%, at least 97%, at least 98%, at least 99% or 100% sequence identity to the full-length or mature chitin binding protein coding sequence of SEQ ID NO: 1, SEQ ID NO: 3, SEQ ID NO: 5, SEQ ID NO: 7, SEQ ID NO: 9, SEQ ID NO: 11, SEQ ID NO: 13, SEQ ID NO: 15, SEQ ID NO: 17, SEQ ID NO: 19, SEQ ID NO: 21, SEQ ID NO: 23, SEQ ID NO: 25, SEQ ID NO: 27, SEQ ID NO: 29, SEQ ID NO: 31, SEQ ID NO: 33, SEQ ID NO: 35, SEQ ID NO: 37, SEQ ID NO: 39, SEQ ID NO: 41, SEQ ID NO: 43, SEQ ID NO: 45, SEQ ID NO: 47, SEQ ID NO: 49, SEQ ID NO: 51, SEQ ID NO: 53, SEQ ID NO: 55, SEQ ID NO: 57, SEQ ID NO: 59, SEQ ID NO: 61, SEQ ID NO: 63, SEQ ID NO: 65, SEQ ID NO: 67, SEQ ID NO: 69, SEQ ID NO: 71, SEQ ID NO: 73, SEQ ID NO: 75, SEQ ID NO: 77, SEQ ID NO: 79, SEQ ID NO: 81, SEQ ID NO: 83, SEQ ID NO: 85, SEQ ID NO: 87, SEQ ID NO: 89, SEQ ID NO: 91, SEQ ID NO: 93, SEQ ID NO: 95, SEQ ID NO: 97, SEQ ID NO: 99, SEQ ID NO: 101, SEQ ID NO: 103, SEQ ID NO: 105, SEQ ID NO: 107, SEQ ID NO: 109, SEQ ID NO: 111, SEQ ID NO: 113, SEQ ID NO: 115, SEQ ID NO: 117, SEQ ID NO: 119, SEQ ID NO: 121, SEQ ID NO: 123, SEQ ID NO: 125, SEQ ID NO: 127, SEQ ID NO: 129, SEQ ID NO: 131, SEQ ID NO: 133, SEQ ID NO: 135, SEQ ID NO: 137, SEQ ID NO: 139, SEQ ID NO: 141, SEQ ID NO: 143, SEQ ID NO: 145, SEQ ID NO: 147, SEQ ID NO: 149, SEQ ID NO: 151, SEQ ID NO: 153, SEQ ID NO: 155, SEQ ID NO: 157, SEQ ID NO: 159, SEQ ID NO: 161, SEQ ID NO: 163, SEQ ID NO: 165, SEQ ID NO: 167, SEQ ID NO: 169, SEQ ID NO: 171, SEQ ID NO: 173, SEQ ID NO: 175, SEQ ID NO: 177, or SEQ ID NO: 179; or the CBM33 coding sequence thereof.

[0415] [24] The method of paragraph 20, wherein the chitin binding protein comprises or consists of SEQ ID NO: 2, SEQ ID NO: 4, SEQ ID NO: 6, SEQ ID NO: 8, SEQ ID NO: 10, SEQ ID NO: 12, SEQ ID NO: 14, SEQ ID NO: 16, SEQ ID NO: 18, SEQ ID NO: 20, SEQ ID NO: 22, SEQ ID NO: 24, SEQ ID NO: 26, SEQ ID NO: 28, SEQ ID NO: 30, SEQ ID NO: 32, SEQ ID NO: 34, SEQ ID NO: 36, SEQ ID NO: 38, SEQ ID NO: 40, SEQ ID NO: 42, SEQ ID NO: 44, SEQ ID NO: 46, SEQ ID NO: 48, SEQ ID NO: 50, SEQ ID NO: 52, SEQ ID NO: 54, SEQ ID NO: 56, SEQ ID NO: 58, SEQ ID NO: 60, SEQ ID NO: 62, SEQ ID NO: 64, SEQ ID NO: 66, SEQ ID NO: 68, SEQ ID NO: 70, SEQ ID NO: 72, SEQ ID NO: 74, SEQ ID NO: 76, SEQ ID NO: 78, SEQ ID NO: 80, SEQ ID NO: 82, SEQ ID NO: 84, SEQ ID NO: 86, SEQ ID NO: 88, SEQ ID NO: 90, SEQ ID NO: 92, SEQ ID NO: 94, SEQ ID NO: 96, SEQ ID NO: 98, SEQ ID NO: 100, SEQ ID NO: 102, SEQ ID NO: 104, SEQ ID NO: 106, SEQ ID NO: 108, SEQ ID NO: 110, SEQ ID NO: 112, SEQ ID NO: 114, SEQ ID NO: 116, SEQ ID NO: 118, SEQ ID NO: 120, SEQ ID NO: 122, SEQ ID NO: 124, SEQ ID NO: 126, SEQ ID NO: 128, SEQ ID NO: 130, SEQ ID NO: 132, SEQ ID NO: 134, SEQ ID NO: 136, SEQ ID NO: 138, SEQ ID NO: 140, SEQ ID NO: 142, SEQ ID NO: 144, SEQ ID NO: 146, SEQ ID NO: 148, SEQ ID NO: 150, SEQ ID NO: 152, SEQ ID NO: 154, SEQ ID NO: 156, SEQ ID NO: 158, SEQ ID NO: 160, SEQ ID NO: 162, SEQ ID NO: 164, SEQ ID NO: 166, SEQ ID NO: 168, SEQ ID NO: 170, SEQ ID NO: 172, SEQ ID NO: 174, SEQ ID NO: 176, SEQ ID NO: 178, or SEQ ID NO: 180; or the CBM33 thereof.

[0416] [25] The method of paragraph 20, wherein the chitin binding protein comprises or consists of the mature chitin binding protein of SEQ ID NO: 2, SEQ ID NO: 4, SEQ ID NO: 6, SEQ ID NO: 8, SEQ ID NO: 10, SEQ ID NO: 12, SEQ ID NO: 14, SEQ ID NO: 16, SEQ ID NO: 18, SEQ ID NO: 20, SEQ ID NO: 22, SEQ ID NO: 24, SEQ ID NO: 26, SEQ ID NO: 28, SEQ ID NO: 30, SEQ ID NO: 32, SEQ ID NO: 34, SEQ ID NO: 36, SEQ ID NO: 38, SEQ ID NO: 40, SEQ ID NO: 42, SEQ ID NO: 44, SEQ ID NO: 46, SEQ ID NO: 48, SEQ ID NO: 50, SEQ ID NO: 52, SEQ ID NO: 54, SEQ ID NO: 56, SEQ ID NO: 58, SEQ ID NO: 60, SEQ ID NO: 62, SEQ ID NO: 64, SEQ ID NO: 66, SEQ ID NO: 68, SEQ ID NO: 70, SEQ ID NO: 72, SEQ ID NO: 74, SEQ ID NO: 76, SEQ ID NO: 78, SEQ ID NO: 80, SEQ ID NO: 82, SEQ ID NO: 84, SEQ ID NO: 86, SEQ ID NO: 88, SEQ ID NO: 90, SEQ ID NO: 92, SEQ ID NO: 94, SEQ ID NO: 96, SEQ ID NO: 98, SEQ ID NO: 100, SEQ ID NO: 102, SEQ ID NO: 104, SEQ ID NO: 106, SEQ ID NO: 108, SEQ ID NO: 110, SEQ ID NO: 112, SEQ ID NO: 114, SEQ ID NO: 116, SEQ ID NO: 118, SEQ ID NO: 120, SEQ ID NO: 122, SEQ ID NO: 124, SEQ ID NO: 126, SEQ ID NO: 128, SEQ ID NO: 130, SEQ ID NO: 132, SEQ ID NO: 134, SEQ ID NO: 136, SEQ ID NO: 138, SEQ ID NO: 140, SEQ ID NO: 142, SEQ ID NO: 144, SEQ ID NO: 146, SEQ ID NO: 148, SEQ ID NO: 150, SEQ ID NO: 152, SEQ ID NO: 154, SEQ ID NO: 156, SEQ ID NO: 158, SEQ ID NO: 160, SEQ ID NO: 162, SEQ ID NO: 164, SEQ ID NO: 166, SEQ ID NO: 168, SEQ ID NO: 170, SEQ ID NO: 172, SEQ ID NO: 174, SEQ ID NO: 176, SEQ ID NO: 178, or SEQ ID NO: 180; or the CBM33 thereof;.

[0417] [26] The method of paragraph 20, wherein the chitin binding protein is a variant of the mature chitin binding protein of SEQ ID NO: 2, SEQ ID NO: 4, SEQ ID NO: 6, SEQ ID NO: 8, SEQ ID NO: 10, SEQ ID NO: 12, SEQ ID NO: 14, SEQ ID NO: 16, SEQ ID NO: 18, SEQ ID NO: 20, SEQ ID NO: 22, SEQ ID NO: 24, SEQ ID NO: 26, SEQ ID NO: 28, SEQ ID NO: 30, SEQ ID NO: 32, SEQ ID NO: 34, SEQ ID NO: 36, SEQ ID NO: 38, SEQ ID NO: 40, SEQ ID NO: 42, SEQ ID NO: 44, SEQ ID NO: 46, SEQ ID NO: 48, SEQ ID NO: 50, SEQ ID NO: 52, SEQ ID NO: 54, SEQ ID NO: 56, SEQ ID NO: 58, SEQ ID NO: 60, SEQ ID NO: 62, SEQ ID NO: 64, SEQ ID NO: 66, SEQ ID NO: 68, SEQ ID NO: 70, SEQ ID NO: 72, SEQ ID NO: 74, SEQ ID NO: 76, SEQ ID NO: 78, SEQ ID NO: 80, SEQ ID NO: 82, SEQ ID NO: 84, SEQ ID NO: 86, SEQ ID NO: 88, SEQ ID NO: 90, SEQ ID NO: 92, SEQ ID NO: 94, SEQ ID NO: 96, SEQ ID NO: 98, SEQ ID NO: 100, SEQ ID NO: 102, SEQ ID NO: 104, SEQ ID NO: 106, SEQ ID NO: 108, SEQ ID NO: 110, SEQ ID NO: 112, SEQ ID NO: 114, SEQ ID NO: 116, SEQ ID NO: 118, SEQ ID NO: 120, SEQ ID NO: 122, SEQ ID NO: 124, SEQ ID NO: 126, SEQ ID NO: 128, SEQ ID NO: 130, SEQ ID NO: 132, SEQ ID NO: 134, SEQ ID NO: 136, SEQ ID NO: 138, SEQ ID NO: 140, SEQ ID NO: 142, SEQ ID NO: 144, SEQ ID NO: 146, SEQ ID NO: 148, SEQ ID NO: 150, SEQ ID NO: 152, SEQ ID NO: 154, SEQ ID NO: 156, SEQ ID NO: 158, SEQ ID NO: 160, SEQ ID NO: 162, SEQ ID NO: 164, SEQ ID NO: 166, SEQ ID NO: 168, SEQ ID NO: 170, SEQ ID NO: 172, SEQ ID NO: 174, SEQ ID NO: 176, SEQ ID NO: 178, or SEQ ID NO: 180, or the CBM33 thereof, comprising a substitution, deletion, and/or insertion at one or more positions.

[0418] [27] The method of paragraph 20, wherein the chitin binding protein is a fragment of SEQ ID NO: 2, SEQ ID NO: 4, SEQ ID NO: 6, SEQ ID NO: 8, SEQ ID NO: 10, SEQ ID NO: 12, SEQ ID NO: 14, SEQ ID NO: 16, SEQ ID NO: 18, SEQ ID NO: 20, SEQ ID NO: 22, SEQ ID NO: 24, SEQ ID NO: 26, SEQ ID NO: 28, SEQ ID NO: 30, SEQ ID NO: 32, SEQ ID NO: 34, SEQ ID NO: 36, SEQ ID NO: 38, SEQ ID NO: 40, SEQ ID NO: 42, SEQ ID NO: 44, SEQ ID NO: 46, SEQ ID NO: 48, SEQ ID NO: 50, SEQ ID NO: 52, SEQ ID NO: 54, SEQ ID NO: 56, SEQ ID NO: 58, SEQ ID NO: 60, SEQ ID NO: 62, SEQ ID NO: 64, SEQ ID NO: 66, SEQ ID NO: 68, SEQ ID NO: 70, SEQ ID NO: 72, SEQ ID NO: 74, SEQ ID NO: 76, SEQ ID NO: 78, SEQ ID NO: 80, SEQ ID NO: 82, SEQ ID NO: 84, SEQ ID NO: 86, SEQ ID NO: 88, SEQ ID NO: 90, SEQ ID NO: 92, SEQ ID NO: 94, SEQ ID NO: 96, SEQ ID NO: 98, SEQ ID NO: 100, SEQ ID NO: 102, SEQ ID NO: 104, SEQ ID NO: 106, SEQ ID NO: 108, SEQ ID NO: 110, SEQ ID NO: 112, SEQ ID NO: 114, SEQ ID NO: 116, SEQ ID NO: 118, SEQ ID NO: 120, SEQ ID NO: 122, SEQ ID NO: 124, SEQ ID NO: 126, SEQ ID NO: 128, SEQ ID NO: 130, SEQ ID NO: 132, SEQ ID NO: 134, SEQ ID NO: 136, SEQ ID NO: 138, SEQ ID NO: 140, SEQ ID NO: 142, SEQ ID NO: 144, SEQ ID NO: 146, SEQ ID NO: 148, SEQ ID NO: 150, SEQ ID NO: 152, SEQ ID NO: 154, SEQ ID NO: 156, SEQ ID NO: 158, SEQ ID NO: 160, SEQ ID NO: 162, SEQ ID NO: 164, SEQ ID NO: 166, SEQ ID NO: 168, SEQ ID NO: 170, SEQ ID NO: 172, SEQ ID NO: 174, SEQ ID NO: 176, SEQ ID NO: 178, or SEQ ID NO: 180; or the CBM33 thereof; wherein the fragment has chitin binding activity.

[0419] [28] The method of any of paragraphs 19-27, wherein the cellulosic material is pretreated.

[0420] [29] The method of any of paragraphs 19-28, wherein the cellulosic material is treated with the enzyme composition in the presence of the chitin binding protein and a GH61 polypeptide having cellulolytic enhancing activity.

[0421] [30] The method of any of paragraphs 19-29, wherein the enzyme composition comprises one or more enzymes selected from the group consisting of a cellulase, a GH61 polypeptide, a hemicellulase, an esterase, an expansin, a laccase, a ligninolytic enzyme, a pectinase, a peroxidase, a protease, and a swollenin.

[0422] [31] The method of paragraph 30, wherein the cellulase is one or more enzymes selected from the group consisting of an endoglucanase, a cellobiohydrolase, and a beta-glucosidase.

[0423] [32] The method of paragraph 30, wherein the hemicellulase is one or more enzymes selected from the group consisting of a xylanase, an acetylxylan esterase, a feruloyl esterase, an arabinofuranosidase, a xylosidase, and a glucuronidase.

[0424] [33] The method of any of paragraphs 19-32, wherein steps (a) and (b) are performed simultaneously in a simultaneous saccharification and fermentation.

[0425] [34] The method of any of paragraphs 19-33, wherein the fermentation product is an alcohol, an organic acid, a ketone, an amino acid, an alkane, a cycloalkane, an alkene, isoprene, polyketide, or a gas.

[0426] [35] The method of any of paragraphs 19-34, wherein the enzyme composition and/or the chitin binding protein are in the form of a fermentation broth with or without cells.

[0427] [36] A method of fermenting a cellulosic material, comprising: fermenting the cellulosic material with one or more fermenting microorganisms, wherein the cellulosic material is saccharified with an enzyme composition in the presence of a chitin binding protein.

[0428] [37] The method of paragraph 36, wherein the chitin binding protein is selected from the group consisting of: (a) a chitin binding protein having at least 60% sequence identity to the full-length or mature chitin binding protein of SEQ ID NO: 2, SEQ ID NO: 4, SEQ ID NO: 6, SEQ ID NO: 8, SEQ ID NO: 10, SEQ ID NO: 12, SEQ ID NO: 14, SEQ ID NO: 16, SEQ ID NO: 18, SEQ ID NO: 20, SEQ ID NO: 22, SEQ ID NO: 24, SEQ ID NO: 26, SEQ ID NO: 28, SEQ ID NO: 30, SEQ ID NO: 32, SEQ ID NO: 34, SEQ ID NO: 36, SEQ ID NO: 38, SEQ ID NO: 40, SEQ ID NO: 42, SEQ ID NO: 44, SEQ ID NO: 46, SEQ ID NO: 48, SEQ ID NO: 50, SEQ ID NO: 52, SEQ ID NO: 54, SEQ ID NO: 56, SEQ ID NO: 58, SEQ ID NO: 60, SEQ ID NO: 62, SEQ ID NO: 64, SEQ ID NO: 66, SEQ ID NO: 68, SEQ ID NO: 70, SEQ ID NO: 72, SEQ ID NO: 74, SEQ ID NO: 76, SEQ ID NO: 78, SEQ ID NO: 80, SEQ ID NO: 82, SEQ ID NO: 84, SEQ ID NO: 86, SEQ ID NO: 88, SEQ ID NO: 90, SEQ ID NO: 92, SEQ ID NO: 94, SEQ ID NO: 96, SEQ ID NO: 98, SEQ ID NO: 100, SEQ ID NO: 102, SEQ ID NO: 104, SEQ ID NO: 106, SEQ ID NO: 108, SEQ ID NO: 110, SEQ ID NO: 112, SEQ ID NO: 114, SEQ ID NO: 116, SEQ ID NO: 118, SEQ ID NO: 120, SEQ ID NO: 122, SEQ ID NO: 124, SEQ ID NO: 126, SEQ ID NO: 128, SEQ ID NO: 130, SEQ ID NO: 132, SEQ ID NO: 134, SEQ ID NO: 136, SEQ ID NO: 138, SEQ ID NO: 140, SEQ ID NO: 142, SEQ ID NO: 144, SEQ ID NO: 146, SEQ ID NO: 148, SEQ ID NO: 150, SEQ ID NO: 152, SEQ ID NO: 154, SEQ ID NO: 156, SEQ ID NO: 158, SEQ ID NO: 160, SEQ ID NO: 162, SEQ ID NO: 164, SEQ ID NO: 166, SEQ ID NO: 168, SEQ ID NO: 170, SEQ ID NO: 172, SEQ ID NO: 174, SEQ ID NO: 176, SEQ ID NO: 178, or SEQ ID NO: 180; or the CBM33 thereof; (b) a chitin binding protein encoded by a polynucleotide that hybridizes under at least medium-high stringency conditions with the full-length or mature chitin binding protein coding sequence of SEQ ID NO: 1, SEQ ID NO: 3, SEQ ID NO: 5, SEQ ID NO: 7, SEQ ID NO: 9, SEQ ID NO: 11, SEQ ID NO: 13, SEQ ID NO: 15, SEQ ID NO: 17, SEQ ID NO: 19, SEQ ID NO: 21, SEQ ID NO: 23, SEQ ID NO: 25, SEQ ID NO: 27, SEQ ID NO: 29, SEQ ID NO: 31, SEQ ID NO: 33, SEQ ID NO: 35, SEQ ID NO: 37, SEQ ID NO: 39, SEQ ID NO: 41, SEQ ID NO: 43, SEQ ID NO: 45, SEQ ID NO: 47, SEQ ID NO: 49, SEQ ID NO: 51, SEQ ID NO: 53, SEQ ID NO: 55, SEQ ID NO: 57, SEQ ID NO: 59, SEQ ID NO: 61, SEQ ID NO: 63, SEQ ID NO: 65, SEQ ID NO: 67, SEQ ID NO: 69, SEQ ID NO: 71, SEQ ID NO: 73, SEQ ID NO: 75, SEQ ID NO: 77, SEQ ID NO: 79, SEQ ID NO: 81, SEQ ID NO: 83, SEQ ID NO: 85, SEQ ID NO: 87, SEQ ID NO: 89, SEQ ID NO: 91, SEQ ID NO: 93, SEQ ID NO: 95, SEQ ID NO: 97, SEQ ID NO: 99, SEQ ID NO: 101, SEQ ID NO: 103, SEQ ID NO: 105, SEQ ID NO: 107, SEQ ID NO: 109, SEQ ID NO: 111, SEQ ID NO: 113, SEQ ID NO: 115, SEQ ID NO: 117, SEQ ID NO: 119, SEQ ID NO: 121, SEQ ID NO: 123, SEQ ID NO: 125, SEQ ID NO: 127, SEQ ID NO: 129, SEQ ID NO: 131, SEQ ID NO: 133, SEQ ID NO: 135, SEQ ID NO: 137, SEQ ID NO: 139, SEQ ID NO: 141, SEQ ID NO: 143, SEQ ID NO: 145, SEQ ID NO: 147, SEQ ID NO: 149, SEQ ID NO: 151, SEQ ID NO: 153, SEQ ID NO: 155, SEQ ID NO: 157, SEQ ID NO: 159, SEQ ID NO: 161, SEQ ID NO: 163, SEQ ID NO: 165, SEQ ID NO: 167, SEQ ID NO: 169, SEQ ID NO: 171, SEQ ID NO: 173, SEQ ID NO: 175, SEQ ID NO: 177, or SEQ ID NO: 179; the CBM33 coding sequence thereof; or the full-length complement thereof; (c) a chitin binding protein encoded by a polynucleotide having at least 60% sequence identity to the full-length or mature chitin binding protein coding sequence of SEQ ID NO: 1, SEQ ID NO: 3, SEQ ID NO: 5, SEQ ID NO: 7, SEQ ID NO: 9, SEQ ID NO: 11, SEQ ID NO: 13, SEQ ID NO: 15, SEQ ID NO: 17, SEQ ID NO: 19, SEQ ID NO: 21, SEQ ID NO: 23, SEQ ID NO: 25, SEQ ID NO: 27, SEQ ID NO: 29, SEQ ID NO: 31, SEQ ID NO: 33, SEQ ID NO: 35, SEQ ID NO: 37, SEQ ID NO: 39, SEQ ID NO: 41, SEQ ID NO: 43, SEQ ID NO: 45, SEQ ID NO: 47, SEQ ID NO: 49, SEQ ID NO: 51, SEQ ID NO: 53, SEQ ID NO: 55, SEQ ID NO: 57, SEQ ID NO: 59, SEQ ID NO: 61, SEQ ID NO: 63, SEQ ID NO: 65, SEQ ID NO: 67, SEQ ID NO: 69, SEQ ID NO: 71, SEQ ID NO: 73, SEQ ID NO: 75, SEQ ID NO: 77, SEQ ID NO: 79, SEQ ID NO: 81, SEQ ID NO: 83, SEQ ID NO: 85, SEQ ID NO: 87, SEQ ID NO: 89, SEQ ID NO: 91, SEQ ID NO: 93, SEQ ID NO: 95, SEQ ID NO: 97, SEQ ID NO: 99, SEQ ID NO: 101, SEQ ID NO: 103, SEQ ID NO: 105, SEQ ID NO: 107, SEQ ID NO: 109, SEQ ID NO: 111, SEQ ID NO: 113, SEQ ID NO: 115, SEQ ID NO: 117, SEQ ID NO: 119, SEQ ID NO: 121, SEQ ID NO: 123, SEQ ID NO: 125, SEQ ID NO: 127, SEQ ID NO: 129, SEQ ID NO: 131, SEQ ID NO: 133, SEQ ID NO: 135, SEQ ID NO: 137, SEQ ID NO: 139, SEQ ID NO: 141, SEQ ID NO: 143, SEQ ID NO: 145, SEQ ID NO: 147, SEQ ID NO: 149, SEQ ID NO: 151, SEQ ID NO: 153, SEQ ID NO: 155, SEQ ID NO: 157, SEQ ID NO: 159, SEQ ID NO: 161, SEQ ID NO: 163, SEQ ID NO: 165, SEQ ID NO: 167, SEQ ID NO: 169, SEQ ID NO: 171, SEQ ID NO: 173, SEQ ID NO: 175, SEQ ID NO: 177, or SEQ ID NO: 179; or the CBM33 coding sequence thereof; (d) a variant of the mature chitin binding protein of SEQ ID NO: 2, SEQ ID NO: 4, SEQ ID NO: 6, SEQ ID NO: 8, SEQ ID NO: 10, SEQ ID NO: 12, SEQ ID NO: 14, SEQ ID NO: 16, SEQ ID NO: 18, SEQ ID NO: 20, SEQ ID NO: 22, SEQ ID NO: 24, SEQ ID NO: 26, SEQ ID NO: 28, SEQ ID NO: 30, SEQ ID NO: 32, SEQ ID NO: 34, SEQ ID NO: 36, SEQ ID NO: 38, SEQ ID NO: 40, SEQ ID NO: 42, SEQ ID NO: 44, SEQ ID NO: 46, SEQ ID NO: 48, SEQ ID NO: 50, SEQ ID NO: 52, SEQ ID NO: 54, SEQ ID NO: 56, SEQ ID NO: 58, SEQ ID NO: 60, SEQ ID NO: 62, SEQ ID NO: 64, SEQ ID NO: 66, SEQ ID NO: 68, SEQ ID NO: 70, SEQ ID NO: 72, SEQ ID NO: 74, SEQ ID NO: 76, SEQ ID NO: 78, SEQ ID NO: 80, SEQ ID NO: 82, SEQ ID NO: 84, SEQ ID NO: 86, SEQ ID NO: 88, SEQ ID NO: 90, SEQ ID NO: 92, SEQ ID NO: 94, SEQ ID NO: 96, SEQ ID NO: 98, SEQ ID NO: 100, SEQ ID NO: 102, SEQ ID NO: 104, SEQ ID NO: 106, SEQ ID NO: 108, SEQ ID NO: 110, SEQ ID NO: 112, SEQ ID NO: 114, SEQ ID NO: 116, SEQ ID NO: 118, SEQ ID NO: 120, SEQ ID NO: 122, SEQ ID NO: 124, SEQ ID NO: 126, SEQ ID NO: 128, SEQ ID NO: 130, SEQ ID NO: 132, SEQ ID NO: 134, SEQ ID NO: 136, SEQ ID NO: 138, SEQ ID NO: 140, SEQ ID NO: 142, SEQ ID NO: 144, SEQ ID NO: 146, SEQ ID NO: 148, SEQ ID NO: 150, SEQ ID NO: 152, SEQ ID NO: 154, SEQ ID NO: 156, SEQ ID NO: 158, SEQ ID NO: 160, SEQ ID NO: 162, SEQ ID NO: 164, SEQ ID NO: 166, SEQ ID NO: 168, SEQ ID NO: 170, SEQ ID NO: 172, SEQ ID NO: 174, SEQ ID NO: 176, SEQ ID NO: 178, or SEQ ID NO: 180, or the CBM33 coding sequence thereof, comprising a substitution, deletion, and/or insertion at one or more positions; and (e) a fragment of the chitin binding protein of (a), (b), (c), or (d) that has chitin binding activity.

[0429] [38] The method of paragraph 37, wherein the chitin binding protein has at least 60%, at least 65%, at least 70%, at least 75%, at least 80%, at least 81%, at least 82%, at least 83%, at least 84%, at least 85%, at least 86%, at least 87%, at least 88%, at least 89%, at least 90%, at least 91%, at least 92%, at least 93%, at least 94%, at least 95%, at least 96%, at least 97%, at least 98%, at least 99% or 100% sequence identity to the full-length or mature chitin binding protein of SEQ ID NO: 2, SEQ ID NO: 4, SEQ ID NO: 6, SEQ ID NO: 8, SEQ ID NO: 10, SEQ ID NO: 12, SEQ ID NO: 14, SEQ ID NO: 16, SEQ ID NO: 18, SEQ ID NO: 20, SEQ ID NO: 22, SEQ ID NO: 24, SEQ ID NO: 26, SEQ ID NO: 28, SEQ ID NO: 30, SEQ ID NO: 32, SEQ ID NO: 34, SEQ ID NO: 36, SEQ ID NO: 38, SEQ ID NO: 40, SEQ ID NO: 42, SEQ ID NO: 44, SEQ ID NO: 46, SEQ ID NO: 48, SEQ ID NO: 50, SEQ ID NO: 52, SEQ ID NO: 54, SEQ ID NO: 56, SEQ ID NO: 58, SEQ ID NO: 60, SEQ ID NO: 62, SEQ ID NO: 64, SEQ ID NO: 66, SEQ ID NO: 68, SEQ ID NO: 70, SEQ ID NO: 72, SEQ ID NO: 74, SEQ ID NO: 76, SEQ ID NO: 78, SEQ ID NO: 80, SEQ ID NO: 82, SEQ ID NO: 84, SEQ ID NO: 86, SEQ ID NO: 88, SEQ ID NO: 90, SEQ ID NO: 92, SEQ ID NO: 94, SEQ ID NO: 96, SEQ ID NO: 98, SEQ ID NO: 100, SEQ ID NO: 102, SEQ ID NO: 104, SEQ ID NO: 106, SEQ ID NO: 108, SEQ ID NO: 110, SEQ ID NO: 112, SEQ ID NO: 114, SEQ ID NO: 116, SEQ ID NO: 118, SEQ ID NO: 120, SEQ ID NO: 122, SEQ ID NO: 124, SEQ ID NO: 126, SEQ ID NO: 128, SEQ ID NO: 130, SEQ ID NO: 132, SEQ ID NO: 134, SEQ ID NO: 136, SEQ ID NO: 138, SEQ ID NO: 140, SEQ ID NO: 142, SEQ ID NO: 144, SEQ ID NO: 146, SEQ ID NO: 148, SEQ ID NO: 150, SEQ ID NO: 152, SEQ ID NO: 154, SEQ ID NO: 156, SEQ ID NO: 158, SEQ ID NO: 160, SEQ ID NO: 162, SEQ ID NO: 164, SEQ ID NO: 166, SEQ ID NO: 168, SEQ ID NO: 170, SEQ ID NO: 172, SEQ ID NO: 174, SEQ ID NO: 176, SEQ ID NO: 178, or SEQ ID NO: 180; or the CBM33 thereof.

[0430] [39] The method of paragraph 37, wherein the chitin binding protein is encoded by a polynucleotide that hybridizes under medium-high stringency conditions, high stringency conditions, or very high stringency conditions with the full-length or mature chitin binding protein coding sequence of SEQ ID NO: 1, SEQ ID NO: 3, SEQ ID NO: 5, SEQ ID NO: 7, SEQ ID NO: 9, SEQ ID NO: 11, SEQ ID NO: 13, SEQ ID NO: 15, SEQ ID NO: 17, SEQ ID NO: 19, SEQ ID NO: 21, SEQ ID NO: 23, SEQ ID NO: 25, SEQ ID NO: 27, SEQ ID NO: 29, SEQ ID NO: 31, SEQ ID NO: 33, SEQ ID NO: 35, SEQ ID NO: 37, SEQ ID NO: 39, SEQ ID NO: 41, SEQ ID NO: 43, SEQ ID NO: 45, SEQ ID NO: 47, SEQ ID NO: 49, SEQ ID NO: 51, SEQ ID NO: 53, SEQ ID NO: 55, SEQ ID NO: 57, SEQ ID NO: 59, SEQ ID NO: 61, SEQ ID NO: 63, SEQ ID NO: 65, SEQ ID NO: 67, SEQ ID NO: 69, SEQ ID NO: 71, SEQ ID NO: 73, SEQ ID NO: 75, SEQ ID NO: 77, SEQ ID NO: 79, SEQ ID NO: 81, SEQ ID NO: 83, SEQ ID NO: 85, SEQ ID NO: 87, SEQ ID NO: 89, SEQ ID NO: 91, SEQ ID NO: 93, SEQ ID NO: 95, SEQ ID NO: 97, SEQ ID NO: 99, SEQ ID NO: 101, SEQ ID NO: 103, SEQ ID NO: 105, SEQ ID NO: 107, SEQ ID NO: 109, SEQ ID NO: 111, SEQ ID NO: 113, SEQ ID NO: 115, SEQ ID NO: 117, SEQ ID NO: 119, SEQ ID NO: 121, SEQ ID NO: 123, SEQ ID NO: 125, SEQ ID NO: 127, SEQ ID NO: 129, SEQ ID NO: 131, SEQ ID NO: 133, SEQ ID NO: 135, SEQ ID NO: 137, SEQ ID NO: 139, SEQ ID NO: 141, SEQ ID NO: 143, SEQ ID NO: 145, SEQ ID NO: 147, SEQ ID NO: 149, SEQ ID NO: 151, SEQ ID NO: 153, SEQ ID NO: 155, SEQ ID NO: 157, SEQ ID NO: 159, SEQ ID NO: 161, SEQ ID NO: 163, SEQ ID NO: 165, SEQ ID NO: 167, SEQ ID NO: 169, SEQ ID NO: 171, SEQ ID NO: 173, SEQ ID NO: 175, SEQ ID NO: 177, or SEQ ID NO: 179; the CBM33 coding sequence thereof; or the full-length complement thereof.

[0431] [40] The method of paragraph 37, wherein the chitin binding protein is encoded by a polynucleotide having at least 60%, at least 65%, at least 70%, at least 75%, at least 80%, at least 81%, at least 82%, at least 83%, at least 84%, at least 85%, at least 86%, at least 87%, at least 88%, at least 89%, at least 90%, at least 91%, at least 92%, at least 93%, at least 94%, at least 95%, at least 96%, at least 97%, at least 98%, at least 99% or 100% sequence identity to the full-length or mature chitin binding protein coding sequence of SEQ ID NO: 1, SEQ ID NO: 3, SEQ ID NO: 5, SEQ ID NO: 7, SEQ ID NO: 9, SEQ ID NO: 11, SEQ ID NO: 13, SEQ ID NO: 15, SEQ ID NO: 17, SEQ ID NO: 19, SEQ ID NO: 21, SEQ ID NO: 23, SEQ ID NO: 25, SEQ ID NO: 27, SEQ ID NO: 29, SEQ ID NO: 31, SEQ ID NO: 33, SEQ ID NO: 35, SEQ ID NO: 37, SEQ ID NO: 39, SEQ ID NO: 41, SEQ ID NO: 43, SEQ ID NO: 45, SEQ ID NO: 47, SEQ ID NO: 49, SEQ ID NO: 51, SEQ ID NO: 53, SEQ ID NO: 55, SEQ ID NO: 57, SEQ ID NO: 59, SEQ ID NO: 61, SEQ ID NO: 63, SEQ ID NO: 65, SEQ ID NO: 67, SEQ ID NO: 69, SEQ ID NO: 71, SEQ ID NO: 73, SEQ ID NO: 75, SEQ ID NO: 77, SEQ ID NO: 79, SEQ ID NO: 81, SEQ ID NO: 83, SEQ ID NO: 85, SEQ ID NO: 87, SEQ ID NO: 89, SEQ ID NO: 91, SEQ ID NO: 93, SEQ ID NO: 95, SEQ ID NO: 97, SEQ ID NO: 99, SEQ ID NO: 101, SEQ ID NO: 103, SEQ ID NO: 105, SEQ ID NO: 107, SEQ ID NO: 109, SEQ ID NO: 111, SEQ ID NO: 113, SEQ ID NO: 115, SEQ ID NO: 117, SEQ ID NO: 119, SEQ ID NO: 121, SEQ ID NO: 123, SEQ ID NO: 125, SEQ ID NO: 127, SEQ ID NO: 129, SEQ ID NO: 131, SEQ ID NO: 133, SEQ ID NO: 135, SEQ ID NO: 137, SEQ ID NO: 139, SEQ ID NO: 141, SEQ ID NO: 143, SEQ ID NO: 145, SEQ ID NO: 147, SEQ ID NO: 149, SEQ ID NO: 151, SEQ ID NO: 153, SEQ ID NO: 155, SEQ ID NO: 157, SEQ ID NO: 159, SEQ ID NO: 161, SEQ ID NO: 163, SEQ ID NO: 165, SEQ ID NO: 167, SEQ ID NO: 169, SEQ ID NO: 171, SEQ ID NO: 173, SEQ ID NO: 175, SEQ ID NO: 177, or SEQ ID NO: 179; or the CBM33 coding sequence thereof.

[0432] [41] The method of paragraph 37, wherein the chitin binding protein comprises or consists of SEQ ID NO: 2, SEQ ID NO: 4, SEQ ID NO: 6, SEQ ID NO: 8, SEQ ID NO: 10, SEQ ID NO: 12, SEQ ID NO: 14, SEQ ID NO: 16, SEQ ID NO: 18, SEQ ID NO: 20, SEQ ID NO: 22, SEQ ID NO: 24, SEQ ID NO: 26, SEQ ID NO: 28, SEQ ID NO: 30, SEQ ID NO: 32, SEQ ID NO: 34, SEQ ID NO: 36, SEQ ID NO: 38, SEQ ID NO: 40, SEQ ID NO: 42, SEQ ID NO: 44, SEQ ID NO: 46, SEQ ID NO: 48, SEQ ID NO: 50, SEQ ID NO: 52, SEQ ID NO: 54, SEQ ID NO: 56, SEQ ID NO: 58, SEQ ID NO: 60, SEQ ID NO: 62, SEQ ID NO: 64, SEQ ID NO: 66, SEQ ID NO: 68, SEQ ID NO: 70, SEQ ID NO: 72, SEQ ID NO: 74, SEQ ID NO: 76, SEQ ID NO: 78, SEQ ID NO: 80, SEQ ID NO: 82, SEQ ID NO: 84, SEQ ID NO: 86, SEQ ID NO: 88, SEQ ID NO: 90, SEQ ID NO: 92, SEQ ID NO: 94, SEQ ID NO: 96, SEQ ID NO: 98, SEQ ID NO: 100, SEQ ID NO: 102, SEQ ID NO: 104, SEQ ID NO: 106, SEQ ID NO: 108, SEQ ID NO: 110, SEQ ID NO: 112, SEQ ID NO: 114, SEQ ID NO: 116, SEQ ID NO: 118, SEQ ID NO: 120, SEQ ID NO: 122, SEQ ID NO: 124, SEQ ID NO: 126, SEQ ID NO: 128, SEQ ID NO: 130, SEQ ID NO: 132, SEQ ID NO: 134, SEQ ID NO: 136, SEQ ID NO: 138, SEQ ID NO: 140, SEQ ID NO: 142, SEQ ID NO: 144, SEQ ID NO: 146, SEQ ID NO: 148, SEQ ID NO: 150, SEQ ID NO: 152, SEQ ID NO: 154, SEQ ID NO: 156, SEQ ID NO: 158, SEQ ID NO: 160, SEQ ID NO: 162, SEQ ID NO: 164, SEQ ID NO: 166, SEQ ID NO: 168, SEQ ID NO: 170, SEQ ID NO: 172, SEQ ID NO: 174, SEQ ID NO: 176, SEQ ID NO: 178, or SEQ ID NO: 180; or the CBM33 thereof.

[0433] [42] The method of paragraph 37, wherein the chitin binding protein comprises or consists of the mature chitin binding protein of SEQ ID NO: 2, SEQ ID NO: 4, SEQ ID NO: 6, SEQ ID NO: 8, SEQ ID NO: 10, SEQ ID NO: 12, SEQ ID NO: 14, SEQ ID NO: 16, SEQ ID NO: 18, SEQ ID NO: 20, SEQ ID NO: 22, SEQ ID NO: 24, SEQ ID NO: 26, SEQ ID NO: 28, SEQ ID NO: 30, SEQ ID NO: 32, SEQ ID NO: 34, SEQ ID NO: 36, SEQ ID NO: 38, SEQ ID NO: 40, SEQ ID NO: 42, SEQ ID NO: 44, SEQ ID NO: 46, SEQ ID NO: 48, SEQ ID NO: 50, SEQ ID NO: 52, SEQ ID NO: 54, SEQ ID NO: 56, SEQ ID NO: 58, SEQ ID NO: 60, SEQ ID NO: 62, SEQ ID NO: 64, SEQ ID NO: 66, SEQ ID NO: 68, SEQ ID NO: 70, SEQ ID NO: 72, SEQ ID NO: 74, SEQ ID NO: 76, SEQ ID NO: 78, SEQ ID NO: 80, SEQ ID NO: 82, SEQ ID NO: 84, SEQ ID NO: 86, SEQ ID NO: 88, SEQ ID NO: 90, SEQ ID NO: 92, SEQ ID NO: 94, SEQ ID NO: 96, SEQ ID NO: 98, SEQ ID NO: 100, SEQ ID NO: 102, SEQ ID NO: 104, SEQ ID NO: 106, SEQ ID NO: 108, SEQ ID NO: 110, SEQ ID NO: 112, SEQ ID NO: 114, SEQ ID NO: 116, SEQ ID NO: 118, SEQ ID NO: 120, SEQ ID NO: 122, SEQ ID NO: 124, SEQ ID NO: 126, SEQ ID NO: 128, SEQ ID NO: 130, SEQ ID NO: 132, SEQ ID NO: 134, SEQ ID NO: 136, SEQ ID NO: 138, SEQ ID NO: 140, SEQ ID NO: 142, SEQ ID NO: 144, SEQ ID NO: 146, SEQ ID NO: 148, SEQ ID NO: 150, SEQ ID NO: 152, SEQ ID NO: 154, SEQ ID NO: 156, SEQ ID NO: 158, SEQ ID NO: 160, SEQ ID NO: 162, SEQ ID NO: 164, SEQ ID NO: 166, SEQ ID NO: 168, SEQ ID NO: 170, SEQ ID NO: 172, SEQ ID NO: 174, SEQ ID NO: 176, SEQ ID NO: 178, or SEQ ID NO: 180; or the CBM33 thereof.

[0434] [43] The method of paragraph 37, wherein the chitin binding protein is a variant of the mature chitin binding protein of SEQ ID NO: 2, SEQ ID NO: 4, SEQ ID NO: 6, SEQ ID NO: 8, SEQ ID NO: 10, SEQ ID NO: 12, SEQ ID NO: 14, SEQ ID NO: 16, SEQ ID NO: 18, SEQ ID NO: 20, SEQ ID NO: 22, SEQ ID NO: 24, SEQ ID NO: 26, SEQ ID NO: 28, SEQ ID NO: 30, SEQ ID NO: 32, SEQ ID NO: 34, SEQ ID NO: 36, SEQ ID NO: 38, SEQ ID NO: 40, SEQ ID NO: 42, SEQ ID NO: 44, SEQ ID NO: 46, SEQ ID NO: 48, SEQ ID NO: 50, SEQ ID NO: 52, SEQ ID NO: 54, SEQ ID NO: 56, SEQ ID NO: 58, SEQ ID NO: 60, SEQ ID NO: 62, SEQ ID NO: 64, SEQ ID NO: 66, SEQ ID NO: 68, SEQ ID NO: 70, SEQ ID NO: 72, SEQ ID NO: 74, SEQ ID NO: 76, SEQ ID NO: 78, SEQ ID NO: 80, SEQ ID NO: 82, SEQ ID NO: 84, SEQ ID NO: 86, SEQ ID NO: 88, SEQ ID NO: 90, SEQ ID NO: 92, SEQ ID NO: 94, SEQ ID NO: 96, SEQ ID NO: 98, SEQ ID NO: 100, SEQ ID NO: 102, SEQ ID NO: 104, SEQ ID NO: 106, SEQ ID NO: 108, SEQ ID NO: 110, SEQ ID NO: 112, SEQ ID NO: 114, SEQ ID NO: 116, SEQ ID NO: 118, SEQ ID NO: 120, SEQ ID NO: 122, SEQ ID NO: 124, SEQ ID NO: 126, SEQ ID NO: 128, SEQ ID NO: 130, SEQ ID NO: 132, SEQ ID NO: 134, SEQ ID NO: 136, SEQ ID NO: 138, SEQ ID NO: 140, SEQ ID NO: 142, SEQ ID NO: 144, SEQ ID NO: 146, SEQ ID NO: 148, SEQ ID NO: 150, SEQ ID NO: 152, SEQ ID NO: 154, SEQ ID NO: 156, SEQ ID NO: 158, SEQ ID NO: 160, SEQ ID NO: 162, SEQ ID NO: 164, SEQ ID NO: 166, SEQ ID NO: 168, SEQ ID NO: 170, SEQ ID NO: 172, SEQ ID NO: 174, SEQ ID NO: 176, SEQ ID NO: 178, or SEQ ID NO: 180, or the CBM33 thereof, comprising a substitution, deletion, and/or insertion at one or more positions.

[0435] [44] The method of paragraph 37, wherein the chitin binding protein is a fragment of SEQ ID NO: 2, SEQ ID NO: 4, SEQ ID NO: 6, SEQ ID NO: 8, SEQ ID NO: 10, SEQ ID NO: 12, SEQ ID NO: 14, SEQ ID NO: 16, SEQ ID NO: 18, SEQ ID NO: 20, SEQ ID NO: 22, SEQ ID NO: 24, SEQ ID NO: 26, SEQ ID NO: 28, SEQ ID NO: 30, SEQ ID NO: 32, SEQ ID NO: 34, SEQ ID NO: 36, SEQ ID NO: 38, SEQ ID NO: 40, SEQ ID NO: 42, SEQ ID NO: 44, SEQ ID NO: 46, SEQ ID NO: 48, SEQ ID NO: 50, SEQ ID NO: 52, SEQ ID NO: 54, SEQ ID NO: 56, SEQ ID NO: 58, SEQ ID NO: 60, SEQ ID NO: 62, SEQ ID NO: 64, SEQ ID NO: 66, SEQ ID NO: 68, SEQ ID NO: 70, SEQ ID NO: 72, SEQ ID NO: 74, SEQ ID NO: 76, SEQ ID NO: 78, SEQ ID NO: 80, SEQ ID NO: 82, SEQ ID NO: 84, SEQ ID NO: 86, SEQ ID NO: 88, SEQ ID NO: 90, SEQ ID NO: 92, SEQ ID NO: 94, SEQ ID NO: 96, SEQ ID NO: 98, SEQ ID NO: 100, SEQ ID NO: 102, SEQ ID NO: 104, SEQ ID NO: 106, SEQ ID NO: 108, SEQ ID NO: 110, SEQ ID NO: 112, SEQ ID NO: 114, SEQ ID NO: 116, SEQ ID NO: 118, SEQ ID NO: 120, SEQ ID NO: 122, SEQ ID NO: 124, SEQ ID NO: 126, SEQ ID NO: 128, SEQ ID NO: 130, SEQ ID NO: 132, SEQ ID NO: 134, SEQ ID NO: 136, SEQ ID NO: 138, SEQ ID NO: 140, SEQ ID NO: 142, SEQ ID NO: 144, SEQ ID NO: 146, SEQ ID NO: 148, SEQ ID NO: 150, SEQ ID NO: 152, SEQ ID NO: 154, SEQ ID NO: 156, SEQ ID NO: 158, SEQ ID NO: 160, SEQ ID NO: 162, SEQ ID NO: 164, SEQ ID NO: 166, SEQ ID NO: 168, SEQ ID NO: 170, SEQ ID NO: 172, SEQ ID NO: 174, SEQ ID NO: 176, SEQ ID NO: 178, or SEQ ID NO: 180; or the CBM33 thereof; wherein the fragment has chitin binding activity.

[0436] [45] The method of any of paragraphs 36-44, wherein the fermenting of the cellulosic material produces a fermentation product.

[0437] [46] The method of paragraph 45, further comprising recovering the fermentation product from the fermentation.

[0438] [47] The method of any of paragraphs 36-46, wherein the cellulosic material is pretreated before saccharification.

[0439] [48] The method of any of paragraphs 36-47, wherein the cellulosic material is treated with the enzyme composition in the presence of the chitin binding protein and a GH61 polypeptide having cellulolytic enhancing activity.

[0440] [49] The method of any of paragraphs 36-48, wherein the enzyme composition comprises one or more enzymes selected from the group consisting of a cellulase, a GH61 polypeptide, a hemicellulase, an esterase, an expansin, a laccase, a ligninolytic enzyme, a pectinase, a peroxidase, a protease, and a swollenin.

[0441] [50] The method of paragraph 49, wherein the cellulase is one or more enzymes selected from the group consisting of an endoglucanase, a cellobiohydrolase, and a beta-glucosidase.

[0442] [51] The method of paragraph 49, wherein the hemicellulase is one or more enzymes selected from the group consisting of a xylanase, an acetylxylan esterase, a feruloyl esterase, an arabinofuranosidase, a xylosidase, and a glucuronidase.

[0443] [52] The method of any of paragraphs 45-51, wherein the fermentation product is an alcohol, an organic acid, a ketone, an amino acid, an alkane, a cycloalkane, an alkene, isoprene, polyketide, or a gas.

[0444] [53] The method of any of paragraphs 36-52, wherein the enzyme composition and/or the chitin binding protein are in the form of a fermentation broth with or without cells.

[0445] [54] A whole broth formulation, cell culture composition, or enzyme composition comprising a chitin binding protein and a GH61 polypeptide having cellulolytic enhancing activity.

[0446] [55] The composition of paragraph 54, which further comprises one or more enzymes selected from the group consisting of a cellulase, a hemicellulase, an esterase, an expansin, a laccase, a ligninolytic enzyme, a pectinase, a peroxidase, a protease, and a swollenin.

[0447] [56] The composition of paragraph 55, wherein the cellulase is one or more enzymes selected from the group consisting of an endoglucanase, a cellobiohydrolase, and a beta-glucosidase.

[0448] [57] The composition of paragraph 55, wherein the hemicellulase is one or more enzymes selected from the group consisting of a xylanase, an acetylxylan esterase, a feruloyl esterase, an arabinofuranosidase, a xylosidase, and a glucuronidase.

[0449] [58] A whole broth formulation, cell culture composition, or enzyme composition comprising a chitin binding protein and one or more enzymes.

[0450] [59] The composition of paragraph 58, which the one or more enzymes are selected from the group consisting of a cellulase, a GH61 polypeptide, a hemicellulase, an esterase, an expansin, a laccase, a ligninolytic enzyme, a pectinase, a peroxidase, a protease, and a swollenin.

[0451] [60] The composition of paragraph 59, wherein the cellulase is one or more enzymes selected from the group consisting of an endoglucanase, a cellobiohydrolase, and a beta-glucosidase.

[0452] [61] The composition of paragraph 59, wherein the hemicellulase is one or more enzymes selected from the group consisting of a xylanase, an acetylxylan esterase, a feruloyl esterase, an arabinofuranosidase, a xylosidase, and a glucuronidase.

[0453] The invention described and claimed herein is not to be limited in scope by the specific aspects herein disclosed, since these aspects are intended as illustrations of several aspects of the invention. Any equivalent aspects are intended to be within the scope of this invention. Indeed, various modifications of the invention in addition to those shown and described herein will become apparent to those skilled in the art from the foregoing description. Such modifications are also intended to fall within the scope of the appended claims. In the case of conflict, the present disclosure including definitions will control.

[0454] Various references are cited herein, the disclosures of which are incorporated by reference in their entireties.

The application's sequence listing, which the Patent Office published only in electronic form, follows.

SEQUENCE LISTING (350 sequences)

SEQ ID NO: 1 - DNA, 612 bp, Bacillus licheniformis
gtgtatcgtttgccaaaaaccaccttcagcaccgttttcatattagcagccggattgctgtggatgtccatcgttcctcagcaggccttcgctcatggttttatcgaaaaaccggggagcagagcggctctgtgcagtgaggctttcggatttctcaatctgaattggggaagcgtgatgtatgagccgcaaagcctggaagcgaaaaaagggtttccgcatagcggcccggcagatggacaaattgcatccgcaggcgggctgttcggcggaattcttgatcagcagtcggaaaatcgctggtttaaacatatcatgaccggcggagaacacacctttacctggacatataccgccccccacaatacgagccaatggcactactatatcaccaaaaaaggctgggatcctgacaaaccgcttaagcgcgcagactttgaactgattggcgccgttccgcatgacggttcccctgcatctcgcaatttatctcaccacatttatattcctgaagaccgcctcgggtatcatgtcatacttgccgtttgggatgtggctgatactgaaaacgctttctatcaagtgattgatgttgatctagtgaacaaataa

SEQ ID NO: 2 - protein, 203 aa, Bacillus licheniformis
MYRLPKTTFSTVFILAAGLLWMSIVPQQAFAHGFIEKPGSRAALCSEAFGFLNLNWGSVMYEPQSLEAKKGFPHSGPADGQIASAGGLFGGILDQQSENRWFKHIMTGGEHTFTWTYTAPHNTSQWHYYITKKGWDPDKPLKRADFELIGAVPHDGSPASRNLSHHIYIPEDRLGYHVILAVWDVADTENAFYQVIDVDLVNK

SEQ ID NO: 3 - DNA, 612 bp, Bacillus licheniformis
gtgtatcgtttgccaaaaaccaccttcagcaccgttttcatattagcagccggattgctgtggatgtccatcgttcctcagcaggccttcgctcatggttttatcgaaaaaccggggagcagagcggctctgtgcagtgaggctttcggatttctcaatctgaattgtggaagcgtgatgtatgagccgcaaagcctggaagcgaaaaaagggtttccgcatagcggcccggcagatggacaaattgcatccgcaggcgggctgttcggcggaattcttgatcagcagtcggaaaatcgctggtttaaacatatcatgaccggcggagaacacacctttacctggacatataccgccccccacaatacgagccaatggcactactatatcaccaaaaaaggctgggatcctgacaaaccgcttaagcgcgcagactttgaactgattggcgccgttccgcatgacggttcccctgcatctcgcaatttatctcaccacatttatattcctgaagaccgcctcgggtatcatgtcatacttgccgtttgggatgtggctgatactgaaaacgctttctatcaagtgattgatgttgatctagtgaacaaataa

SEQ ID NO: 4 - protein, 203 aa, Bacillus licheniformis
MYRLPKTTFSTVFILAAGLLWMSIVPQQAFAHGFIEKPGSRAALCSEAFGFLNLNCGSVMYEPQSLEAKKGFPHSGPADGQIASAGGLFGGILDQQSENRWFKHIMTGGEHTFTWTYTAPHNTSQWHYYITKKGWDPDKPLKRADFELIGAVPHDGSPASRNLSHHIYIPEDRLGYHVILAVWDVADTENAFYQVIDVDLVNK

SEQ ID NO: 5 - DNA, 681 bp, Bacillus licheniformis
atggccgcgtatgttttctttttgcatcaaaacccgtctcaacactgtgaaaagagaggggattgtaacgtgtatcgtttgccaaaaaccaccttcagcaccgttttcatattagcagccggattgctgtggatgtccatcgttcctcagcaggccttcgctcatggttttatcgaaaaaccggggagcagagcggctctgtgcagtgaggctttcggatttctcaatctgaattgtggaagcgtgatgtatgagccgcaaagcctggaagcgaaaaaagggtttccgcatagcggcccggcagatggacaaattgcatccgcaggcgggctgttcggcggaattcttgatcagcagtcggaaaatcgctggtttaaacatatcatgaccggcggagaacacacctttacctggacatataccgccccccacaatacgagccaatggcactactatatcaccaaaaaaggctgggatcctgacaaaccgcttaagcgcgcagactttgaactgattggcgccgttccgcatgacggttcccctgcatctcgcaatttatctcaccacatttatattcctgaagaccgcctcgggtatcatgtcatacttgccgtttgggatgtggctgatactgaaaacgctttctatcaagtgattgatgttgatctagtgaacaaataa

SEQ ID NO: 6 - protein, 226 aa, Bacillus licheniformis
MAAYVFFLHQNPSQHCEKRGDCNVYRLPKTTFSTVFILAAGLLWMSIVPQQAFAHGFIEKPGSRAALCSEAFGFLNLNCGSVMYEPQSLEAKKGFPHSGPADGQIASAGGLFGGILDQQSENRWFKHIMTGGEHTFTWTYTAPHNTSQWHYYITKKGWDPDKPLKRADFELIGAVPHDGSPASRNLSHHIYIPEDRLGYHVILAVWDVADTENAFYQVIDVDLVNK

SEQ ID NO: 7 - DNA, 612 bp, Bacillus sp BT1B CT2
gtgtatcgtttgccaaaaaccaccttcagcaccgctttcatattagcagccggattgctgtggatgtccatcgttcctcagcaggccttcgctcatggttttatcgaaaaaccggggagcagagcggctctgtgcagtgaggctttcggatttctcaatctgaattgtggaagcgtgatgtatgagccgcaaagcctggaagcgaaaaaagggtttccgcatagcggcccggcagatggacaaattgcatccgcaggcgggctgttcggcggaattcttgatcagcagtcggaaaatcgctggtttaaacatatcatgaccggcggagaacacacctttacctggacatataccgccccccacaatacgagccaatggcactactatatcaccaaaaaaggctgggatcctgacaaaccgcttaagcgcgcagactttgaactgattggcgccgttccgcatgacggttcccctgcatctcgcaatttatctcaccacatttatattcctgaagaccgcctcgggtatcatgtcatacttgccgtttgggatgtggctgatactgaaaacgctttctatcaagtgattgatgttgatctagtaaacaaataa

SEQ ID NO: 8 - protein, 203 aa, Bacillus sp BT1B CT2
MYRLPKTTFSTAFILAAGLLWMSIVPQQAFAHGFIEKPGSRAALCSEAFGFLNLNCGSVMYEPQSLEAKKGFPHSGPADGQIASAGGLFGGILDQQSENRWFKHIMTGGEHTFTWTYTAPHNTSQWHYYITKKGWDPDKPLKRADFELIGAVPHDGSPASRNLSHHIYIPEDRLGYHVILAVWDVADTENAFYQVIDVDLVNK

SEQ ID NO: 9 - DNA, 1371 bp, Bacillus thuringiensis
atgaataaaaaaattttagggcagtttagaaaaatggctacaaataaaaaagggttaagtgctgctgcagtagcagtgggaattatgagtacaactcttattcctcaaaatgcctatgcacatgggtttgttgaaaagccaggtagccgtgcagctttatgcagtcaaaattatggagcgctgaatttaaattgtggaaatataatgtatgaaccgcaaagtttagaagctcctaaaggattcccacagggtggaccagcagacgggaaaattgcttcagcaggaggtctgtttggtgggattctcgatcaacaaacagctgatcgatggtttaagaatacgattaagggcggagaaaataccttcacttggaaatacacagctccccattcaacaagtcaatggcactattacatcacgaaaaagggatgggatccaaataaacctttaacaagagcagattttgagccaattggtactgtaaaacacgatggttctaaagcatctaataatttatcacataaaatcaatgtaccaactgatcgcagtgggtaccatgttattttagctgtttgggatgtagctgatactgtaaacgctttctataatgtaatcgatgtgaatctaataaatgatgaaaaaccagataaagaggcaccaactcagccatctgaactacaagtaataaaagctacttcaaatagtgtagaatttaattggaaacctgcaacagacaatgaaggggtgaaagaatatcaagtgctacgtaatggggaattaattaatactgtagtcggtacaagtgtaattgataaaaaattaaacccaaatacagaatatacgtatacagtaagagcagtagatgctgcaggaaatatatctgaggaaagtgaagcactagttattaaaacaacagaggaaaaaccagatacagaagcaccgacccagcctaaaggattacacagtatgggaaccactacaagtagtattgatttaatgtggagtccatcggaagataatatagatgtgagccattatattgtatacagagaagttggaggagtcatgaaagaaataggtactgctaatacaacttcatttatggacaaagatttgcaaacgaatacagcatataagtatgtagtatctgctgtcgatacatctggtaatgaatcaatgaaaagtgatgccatcacagttactacaaaaggacaagaaaactcttatgaacaatgggatgcgcgtaaagcgtataaagtaggagatagagtagttcatgaggataaggtgtatgaggcagttcagagttatcaagggaatggggatccaaattggatttttgcattgtcattatggaaagaagtaaactaa

SEQ ID NO: 10 - protein, 456 aa, Bacillus thuringiensis
MNKKILGQFRKMATNKKGLSAAAVAVGIMSTTLIPQNAYAHGFVEKPGSRAALCSQNYGALNLNCGNIMYEPQSLEAPKGFPQGGPADGKIASAGGLFGGILDQQTADRWFKNTIKGGENTFTWKYTAPHSTSQWHYYITKKGWDPNKPLTRADFEPIGTVKHDGSKASNNLSHKINVPTDRSGYHVILAVWDVADTVNAFYNVIDVNLINDEKPDKEAPTQPSELQVIKATSNSVEFNWKPATDNEGVKEYQVLRNGELINTVVGTSVIDKKLNPNTEYTYTVRAVDAAGNISEESEALVIKTTEEKPDTEAPTQPKGLHSMGTTTSSIDLMWSPSEDNIDVSHYIVYREVGGVMKEIGTANTTSFMDKDLQTNTAYKYVVSAVDTSGNESMKSDAITVTTKGQENSYEQWDARKAYKVGDRVVHEDKVYEAVQSYQGNGDPNWIFALSLWKEVN

SEQ ID NO: 11 - DNA, 1371 bp, Bacillus cereus
atgaataaaaaaattttaggacagtttagaaaaatggctacaaataaaaaaggattaagtgctgctgcagtagcgatgggaattatgagtacaactctaattcctcaaaatgcctatgcacatgggtttgttgaaaagccaggtagccgtgcagctttatgcagtcaaaattacggagcgctgaattcaaattgtggaaatataatgtatgaaccgcaaagtttagaagctcctaaaggattcccacaaggtggaccagcagatgggaaaattgcttcagcgggaggcctgtttggtgggattcttgatcaacaaacagctaatcgatggtttaagaatacaattaaaggtggagaaaataccttcacttggaaatacacagctcctcattcaaccagtcaatggcactattacatcacgaaaaagggatgggatccaaataaacctttagcaagagcagactttgagttaattggtactgtaaaacacgatggttctaaagcatctaataatttatcacataaaatcaatgtaccaactgatcgtagtgggtacaatgttattttagctgtttgggatgtagctgatactgtaaacgctttctataatgtgattgatgtgaatctaataaatgatgaaaaaccagataaagaggcgccaaccaagccatctgaactacaagtaataaaagctacttcaaatagtgtagaatttaattggaaacctgcaacagacaatgaaggggtgaaagaatatcaagtgctacgtaatggggaattaattaatactgtagtcggtacaagtgtaattgataaaaaattaaacctaaacacagaatatacgtatacagtaagtgcagtagatgctgcaggaaatatatctgagaaaagtgaagcattagttattaaaacaacagaggaaaaaccagatacagaagcaccaacccagcctaaaggattgcacagtatgggaaccactacgagtagtattgatttaatgtggagtccatcggaggataatgtagatgtgagccattatattgtatacagagaagttggaggggccatgaaagaaataggtactgctaatacaacttcatttatggacaaagatttgcgagcgaatacaacatataagtatgtagtatctgctgtcgatacatctggtaatgaatcaatgaaaagtgatgccatcaaagttacaacaaaaggacaagaaaactcttatgaacaatgggatgcgcataaagcgtataaagcaggagatagagtagttcatgaggataaggtgtatgaggcagttcagagttatcaagggaatggggatccaaattggatttttgccttgtcattatgggaagaaataaactaa

SEQ ID NO: 12 - protein, 456 aa, Bacillus cereus
MNKKILGQFRKMATNKKGLSAAAVAMGIMSTTLIPQNAYAHGFVEKPGSRAALCSQNYGALNSNCGNIMYEPQSLEAPKGFPQGGPADGKIASAGGLFGGILDQQTANRWFKNTIKGGENTFTWKYTAPHSTSQWHYYITKKGWDPNKPLARADFELIGTVKHDGSKASNNLSHKINVPTDRSGYNVILAVWDVADTVNAFYNVIDVNLINDEKPDKEAPTKPSELQVIKATSNSVEFNWKPATDNEGVKEYQVLRNGELINTVVGTSVIDKKLNLNTEYTYTVSAVDAAGNISEKSEALVIKTTEEKPDTEAPTQPKGLHSMGTTTSSIDLMWSPSEDNVDVSHYIVYREVGGAMKEIGTANTTSFMDKDLRANTTYKYVVSAVDTSGNESMKSDAIKVTTKGQENSYEQWDAHKAYKAGDRVVHEDKVYEAVQSYQGNGDPNWIFALSLWEEIN

SEQ ID NO: 13 - DNA, 1371 bp, Bacillus cereus
atgaataaaaaaattctaaagcagttgagaaaaatgactacaaataaaaagggattaagtgctgctgtagtagcagtaggaattatgagtacaactttaattcctcaaaatgcctatgcacatgggttcgttgaaaaaccaggtagccgtgctgctttatgtagccagaattatggagctttgaatttaaattgtggcaatgtaatgtatgagccgcaaagcttagaagcgcctaaaggattcccacaaggtggaccggttgatgggaaaattgcttcagcaggaggcctgtttggtgggattcttgatcaacaaacagctgatcgatggtttaagaatacgattaagggtggagagaatacattcacttggaaatacactgctcctcatttaacaagtcaatggcactattacatcacaaaaaaaggatgggatccaaataaacctctaacaagagcggattttgaaccaataggaactgtaaaacacgatggttctgcagcatctaataatttatcacataaaattaatgtaccaactgatcgtagtggatatcatgtcattttagcggtttgggatgtagctgataccgtaaatgctttttataatgtgattgatgtgaatctagttaataatgaaaaaccagatacagaagcaccaactcagccatctggactacaagtagtaaaagccacttcaaatagcgtagaacttaattggaagcctgcaacagataatgtaggggtgaaagagtatcaagtgttacgtaatggagaagtaattaatactgtagcgggtactagtttagttgataaaaaattaagcccaaacacagattacacgtatacagtaaaagcagtagatgctgtagggaatatatctaaggaaagtggagcattagttattaaaacaacagtggaaaaaccagatacagaagcgccaactcaacctaaagggttacacagtatgggaatcactgccaatactgttgacttaatgtggagtccgtctgaagataacatagatgtggatcattatattgtatacagagaaattgcaggggttacgaaggaaataggtactgttaataccacatcatttatagacaagaatttgcaagcaaatacaacatacaagtatgcagtttctgcagttgatacggctggcaatgaatcaatgaaaagtgatatcttaacagttactacgaaggaacaagaaaacgcttatgagaaatgggattcgtataaagcatataaaaaaggagatagagtagttcacgagggtaaggaatacgaggcggcccaaagctatcaagggaatggggatccgaattggatctttgctttatctttatggaatgaaataaaatag

SEQ ID NO: 14 - protein, 456 aa, Bacillus cereus
MNKKILKQLRKMTTNKKGLSAAVVAVGIMSTTLIPQNAYAHGFVEKPGSRAALCSQNYGALNLNCGNVMYEPQSLEAPKGFPQGGPVDGKIASAGGLFGGILDQQTADRWFKNTIKGGENTFTWKYTAPHLTSQWHYYITKKGWDPNKPLTRADFEPIGTVKHDGSAASNNLSHKINVPTDRSGYHVILAVWDVADTVNAFYNVIDVNLVNNEKPDTEAPTQPSGLQVVKATSNSVELNWKPATDNVGVKEYQVLRNGEVINTVAGTSLVDKKLSPNTDYTYTVKAVDAVGNISKESGALVIKTTVEKPDTEAPTQPKGLHSMGITANTVDLMWSPSEDNIDVDHYIVYREIAGVTKEIGTVNTTSFIDKNLQANTTYKYAVSAVDTAGNESMKSDILTVTTKEQENAYEKWDSYKAYKKGDRVVHEGKEYEAAQSYQGNGDPNWIFALSLWNEIK

SEQ ID NO: 15 - DNA, 1371 bp, Bacillus cereus
atgaataaaaaaattctaaagcagttgagaaaaatgactacaaataaaaagggattaagtgctgctgtagtagcagtaggaattatgagtacaactttaattcctcaaaatgcctatgcacatgggttcgttgaaaaaccaggtagccgtgctgctttatgtagccagaattatggagctttgaatttaaattgtggcaatgtaatgtatgagccgcaaagcttagaagcgcctaaaggattcccacaaggtggaccggttgatgggaaaattgcttcagcaggaggcctgtttggtgggattcttgatcaacaaacagctgatcgatggtttaagaatacgattaagggtggagagaatacattcacttggaaatacactgctcctcatttaacaagtcaatggcactattacatcacaaaaaaaggatgggatccaaataaacctctaacaagagcggattttgaaccaataggaactgtaaaacacgatggttctgcagcatctaataatttatcacataaaattaatgtaccaactgatcgtagtggatatcatgtcattttagcggtttgggatgtagcagataccgtaaatgctttttataatgtgattgatgtgaatctagttaataatgaaaaaccagatacagaagcaccaactcagccatctggactacaagtagtaaaagccacttcaaatagcgtagaacttaattggaagcctgcaacagataatgtaggggtgaaagagtatcaagttttacgtaatggagaagtaattaatactgtagcgggtactagtttagttgataaaaaattaagcccaaacacagattacacgtatacagtaaaagcagtagatgctgtagggaatatatctaaggaaagtgaagcattagttattaaaacaacagtggaaaaaccagatacagaagcgccaactcaacctaaagggttacacagtatgggaatcgctgccaatactgttgacttaatgtggagtccgtctgaagataacatagatgtggatcattatattgtatacagagaaattgcaggggttacgaaggaaataggtactgttaataccacatcatttatagacaagaatttgcaagcaaatacaacatacaagtatgtagtttctgcagttgatacggctggcaatgaatcaatgaaaagtgatatcttaacagttactacgaaggaacaagaaaacgcttatgagaaatgggattcgtataaagcatataaaaaaggagatagagtagttcacgagggtaaggaatacgaggcggcccaaagctatcaagggaatggggatccgaattggatctttgctttatctttatggaatgaaataaaatag

SEQ ID NO: 16 - protein, 456 aa, Bacillus cereus
MNKKILKQLRKMTTNKKGLSAAVVAVGIMSTTLIPQNAYAHGFVEKPGSRAALCSQNYGALNLNCGNVMYEPQSLEAPKGFPQGGPVDGKIASAGGLFGGILDQQTADRWFKNTIKGGENTFTWKYTAPHLTSQWHYYITKKGWDPNKPLTRADFEPIGTVKHDGSAASNNLSHKINVPTDRSGYHVILAVWDVADTVNAFYNVIDVNLVNNEKPDTEAPTQPSGLQVVKATSNSVELNWKPATDNVGVKEYQVLRNGEVINTVAGTSLVDKKLSPNTDYTYTVKAVDAVGNISKESEALVIKTTVEKPDTEAPTQPKGLHSMGIAANTVDLMWSPSEDNIDVDHYIVYREIAGVTKEIGTVNTTSFIDKNLQANTTYKYVVSAVDTAGNESMKSDILTVTTKEQENAYEKWDSYKAYKKGDRVVHEGKEYEAAQSYQGNGDPNWIFALSLWNEIK

SEQ ID NO: 17 - DNA, 1368 bp, Bacillus thuringiensis
atgaataatcgatttttaaaacaactacaaaatatgaaaatgaacaaaaaaagtttaggagttgtagcattaacagctggaattattagtacgacacttattcctcaaaatgcttatgcgcacggttttgttgaaaagcccggtagccgatccgctttatgtagtccaacttatggtgcgctaaatgtaaactgtggaagtgttatgtatgaaccacaaagtttagaagctccaaaagggttcccacaaggtggtccagtagatggacaaattgcttcagcaggcggaaaatttggtggtattttagatcaacaaacagaaaatcgttggtttaaaaatacaatcactggtggggaaaatacatttacttggaagtatactgcgcctcacttaacgagtaagtggcattactatattactaaaaaaggatggaatccaaataaagcgctaacaagagcagatttcgaaccaattggaactgtacaacatgatggttctgcagcttcaaataatttaactcataaaatcaatgtacctactgatcgtagtggatatcatgtgattttagcagtatgggatgtagctgatacagcaaatgcattctataatgtaattgatgttaatcttattaatgatgtgaaaccagacatagaagcaccaagtattccaaatggacttcagacgcaaaaagtaacagcgaatagtgtagaactaacatggaacgcttctacggataatgtaggggtaaaaggatatcaaatcttccgtaacggagagatgattgatacagtaccagggactcattttattgataagaagttacaaccaagtacagaatactcttatactgtaaaagcaattgacgcagctggcaatgtatcgacagaaagtacagcgcttacagtaaaaacgacagttgagactcctgatacagaagcaccaacacaaccaaaaggattacatagtatgggaacgacagcgtcaagtgtggatttaatgtggagtccatctgacgataatattggtgtagaccattatgatatttatagagaaacagaaggatcaatgaaaaagattgcaacatccaatacaacttcttatttggataaaaatctgctcgctaatactacttataaatatgtagtgaaagctgttgatgtagctggaaatgaatccgtacagagtgatatattcacaattactacaaaaaccgaaagcgcttcatatgaagcgtgggatgcaaaaaaagcatataaaaagggagatagagttctacacgaaggaaaagtatatgaagcagtccagagttatcaaggaaatggtgatccaaactggatatatgcattatcattatggaaaacagtgtaa

SEQ ID NO: 18 - protein, 455 aa, Bacillus thuringiensis
MNNRFLKQLQNMKMNKKSLGVVALTAGIISTTLIPQNAYAHGFVEKPGSRSALCSPTYGALNVNCGSVMYEPQSLEAPKGFPQGGPVDGQIASAGGKFGGILDQQTENRWFKNTITGGENTFTWKYTAPHLTSKWHYYITKKGWNPNKALTRADFEPIGTVQHDGSAASNNLTHKINVPTDRSGYHVILAVWDVADTANAFYNVIDVNLINDVKPDIEAPSIPNGLQTQKVTANSVELTWNASTDNVGVKGYQIFRNGEMIDTVPGTHFIDKKLQPSTEYSYTVKAIDAAGNVSTESTALTVKTTVETPDTEAPTQPKGLHSMGTTASSVDLMWSPSDDNIGVDHYDIYRETEGSMKKIATSNTTSYLDKNLLANTTYKYVVKAVDVAGNESVQSDIFTITTKTESASYEAWDAKKAYKKGDRVLHEGKVYEAVQSYQGNGDPNWIYALSLWKTV

SEQ ID NO: 19 - DNA, 1371 bp, Bacillus thuringiensis
atgaataaaaaaattctagggcagtttagaaaaatggcaacaaataaaaaaggattaagtgctgctgcagtagcagtgggaattatgagtacaactcttattcctcaaaatgcctatgcacatgggtttgttgaaaagccaggtagccgtgcagctttatgcagtcaaaattatggggcgctgaattcaaattgtggaaatataatgtatgaaccacaaagtttagaagctcctaaaggattcccacagggtggaccagcagacgggaaaattgcttcagcaggaggcctgtttggtgggattcttgatcaacaaacagctgatcgatggtttaagaatacgattaaaggcggagaaaacacctttacttggaaatacacagctcctcattcaacaagtcaatggcactattacatcacgaaaaagggatggaatccaaataaacctttaacaagagcagattttgagccaattggtactgtaaaacacgatggttctaaagcatctaataatttatcacataaaatcaatgtaccaactgatcgcagtgggtaccatgttattttagctgtttgggatgtagctgatactgtaaacgctttctataatgtaatcgatgtgaatctaataaatgatgaaaaaccagataaagaggcaccaactcagccatctgaactacaagtaataaaagctacttcaaatagtgtagaacttaattggaaacctgtaacagacaatgaaggggtgaaagaatatcaagtgctacgtaatggggaattaattaatactgtagtcggtacaagtgtaattgataaaaaattaaacccaaatacagaatatacgtatacagtaagagcagtagatgctgcaggaaatatatctgaggaaagtgaagcactagttattaaaacaacagaggaaaaaccagatacagaagcaccgacccagcctaaaggattacacagtatgggaaccactacaagtagtattgatttaatgtggagtccatcggaagataatatagatgtgagccattatattgtatacagagaagttggaggagtcatgaaagaaataggtactgctaatacaacttcatttatggacaaagatttgcaagcgaatacagcatataagtatgtagtatctgctgtcgatacatctggtaatgaatcaatgaaaagtgatgccatcacagttactacaaaaggacaagaaaactcttatgaacaatgggatgcgcgtaaagcgtataaagtaggagatagagtagttcatgaggataaggtgtatgaggcagttcagagttatcaagggaatggggatccaaattggatttttgcattgtcattatggaaagaagtaaactaa

SEQ ID NO: 20 - protein, 456 aa, Bacillus thuringiensis
MNKKILGQFRKMATNKKGLSAAAVAVGIMSTTLIPQNAYAHGFVEKPGSRAALCSQNYGALNSNCGNIMYEPQSLEAPKGFPQGGPADGKIASAGGLFGGILDQQTADRWFKNTIKGGENTFTWKYTAPHSTSQWHYYITKKGWNPNKPLTRADFEPIGTVKHDGSKASNNLSHKINVPTDRSGYHVILAVWDVADTVNAFYNVIDVNLINDEKPDKEAPTQPSELQVIKATSNSVELNWKPVTDNEGVKEYQVLRNGELINTVVGTSVIDKKLNPNTEYTYTVRAVDAAGNISEESEALVIKTTEEKPDTEAPTQPKGLHSMGTTTSSIDLMWSPSEDNIDVSHYIVYREVGGVMKEIGTANTTSFMDKDLQANTAYKYVVSAVDTSGNESMKSDAITVTTKGQENSYEQWDARKAYKVGDRVVHEDKVYEAVQSYQGNGDPNWIFALSLWKEVN

SEQ ID NO: 21 - DNA, 1371 bp, Bacillus cereus
atgaataaaaaaattttagggcagtttagaaaaatggctacaaataaaaaaggattaagtgctgctgcagtagcagtgggaattatgagtacaactcttattcctcaaaatgcctatgcacatgggtttgttgaaaagccaggtagccgtgcagctttatgcagtcaaaattatggggcgctaaattcaaattgtggaaatataatgtatgaaccacaaagtttagaagctcctaaaggattcccacagggtggaccagcagacgggaaaattgcttcagcaggaggcctgtttggtgggattcttgatcaacaaacagctgatcgatggtttaagaatacgattaaaggcggagaaaacacctttacttggaaatacacagctcctcattcaacaagtcaatggcactattacatcacgaaaaagggatggaatccaaataaacctttaacaagagcagattttgagccaattggtactgtaaaacacgatggttctaaagcatctaataatttatcacataaaatcaatgtaccaactgatcgcagtgggtaccatgttattttagctgtttgggatgtagctgatactgtaaacgctttctataatgtaatcgatgtgaatctaataaatgatgaaaaaccagatacagaagcaccagctcagccatctggactacaagtagtaaaaactacctcaaatagtgtagaacttaattggaaacccgcaacagacaatgtaggagtgaaagaatatcaagtgctacgtaatggagaactaattaatactgtagtcggtacaagtgtaattgataaaaaattaaacccaaacacagaatatacgtatacagtaagagcagtagatgctgcaggaaatatatctgagaaaagtgaagcattagttattaaaacaacagaggaaaaaccagacacagaagcaccaactcaacctaaaggattacacagtatgggaactactacgagtagtattgatttaatgtggagtccatcggaggataatgtagatgtgagccattatattgtatacagagaagttggaggggccatgaaagaaataggtactgctaatacaacttcatttatggacaaagatttgcaagcgaatacagtatataagtatgtagtatctgctgtcgatacatctggtaatgaatcaatgaaaagtgatgccatcactgttacaacaaaaggacaagaaaactcttatgaacaatgggatgcgcgtaaagcgtataaagcaggagatagagtagttcatgagaataaggtgtatgaggcagttcagagttatcaagggaatggggatccaaattggatttttgcattgtcattatggaaagaagtaaactaa

SEQ ID NO: 22 - protein, 456 aa, Bacillus cereus
MNKKILGQFRKMATNKKGLSAAAVAVGIMSTTLIPQNAYAHGFVEKPGSRAALCSQNYGALNSNCGNIMYEPQSLEAPKGFPQGGPADGKIASAGGLFGGILDQQTADRWFKNTIKGGENTFTWKYTAPHSTSQWHYYITKKGWNPNKPLTRADFEPIGTVKHDGSKASNNLSHKINVPTDRSGYHVILAVWDVADTVNAFYNVIDVNLINDEKPDTEAPAQPSGLQVVKTTSNSVELNWKPATDNVGVKEYQVLRNGELINTVVGTSVIDKKLNPNTEYTYTVRAVDAAGNISEKSEALVIKTTEEKPDTEAPTQPKGLHSMGTTTSSIDLMWSPSEDNVDVSHYIVYREVGGAMKEIGTANTTSFMDKDLQANTVYKYVVSAVDTSGNESMKSDAITVTTKGQENSYEQWDARKAYKAGDRVVHENKVYEAVQSYQGNGDPNWIFALSLWKEVN

SEQ ID NO: 23 - DNA, 1368 bp, Bacillus cereus
atgaataatcgatttttaaaacaactacaaaatatgaaaatgaacaaaaaaagtttaggagctgtagcattaacagctggaattattagtacgacacttattcctcaaaatgcttatgcgcacggttttgttgaaaagcccggtagccgatccgctttatgtagtccaacttatggtgcgctaaatgtaaactgtggaagtgttatgtatgaaccacaaagtttagaagctccaaaagggttcccgcaaggtggtccagtagatggacaaattgcttcagcaggcggaaaatttggtggtattttagatcaacaaacagaaaatcgttggtttaaaaatacaatcactggtggggaaaatacatttacttggaagtatactgcgcctcacttaacgagtaagtggcattactatattactaaaaaaggatggaatccaaataaagcgctaacaagagcagatttcgaaccaattggaactgtacaacatgatggttctgcagcttcaaataatttaactcataaaatcaatgtacctactgatcgtagtggatatcatgtgattttagcagtatgggatgtagctgatacagcaaatgcattctataatgtaattgatgttaatcttattaatgatgtgaaaccagacatagaagcgccaagtagtccaaatggacttcagacgcaaaaagtaacagcgaatagtgtagaactaacatggaacgcttctacggataatgtaggggtaaaaggatatcaaatcttccgtaacggagagatgattgatacagtaccagggactcattttattgataagaagttacaaccaagtacagaatactcttatactgtaaaagcaattgacgcagctggcaatgtatcgaaagaaagtacagcgcttacagtaaaaacgacagttgagactcctgatacagaagcaccaacacaaccaaaaggattacatagtatgggaacgacagcgtcaagtgtggatttaatgtggagtccatctgacgataatattggtgtagaccattatgatatttatagagaaacagaagggtcaatgaaaaagattgcaacatccaatacaacttcttatttggataaaaatctgctcgctaatactacttataaatatgtagtgaaagctgttgatgtagctggaaatgaatccgtacagagtgatatattcacaattactacaaaaactgaaagcgcttcacatgaagcgtgggatgcaaaaaaagcatataaaaagggagatagagttctacacgaaggaaaagtatatgaagcagtccagagttatcaaggaaatggtgatccaaactggatttatgcattatcattatggaaaacagtgtaa

SEQ ID NO: 24 - protein, 455 aa, Bacillus cereus
MNNRFLKQLQNMKMNKKSLGAVALTAGIISTTLIPQNAYAHGFVEKPGSRSALCSPTYGALNVNCGSVMYEPQSLEAPKGFPQGGPVDGQIASAGGKFGGILDQQTENRWFKNTITGGENTFTWKYTAPHLTSKWHYYITKKGWNPNKALTRADFEPIGTVQHDGSAASNNLTHKINVPTDRSGYHVILAVWDVADTANAFYNVIDVNLINDVKPDIEAPSSPNGLQTQKVTANSVELTWNASTDNVGVKGYQIFRNGEMIDTVPGTHFIDKKLQPSTEYSYTVKAIDAAGNVSKESTALTVKTTVETPDTEAPTQPKGLHSMGTTASSVDLMWSPSDDNIGVDHYDIYRETEGSMKKIATSNTTSYLDKNLLANTTYKYVVKAVDVAGNESVQSDIFTITTKTESASHEAWDAKKAYKKGDRVLHEGKVYEAVQSYQGNGDPNWIYALSLWKTV

SEQ ID NO: 25 - DNA, 1368 bp, Bacillus weihenstephanensis
atgaataatcgaattttaaaacacttacaaaacatgaaaatgaataagaaaagtttaggagccgtagcattaacggctggaatcataggcacgactctcattcctcaaaatgcatatgcgcacggttttgttgaaaaacctggaagtcgttctgctttatgtagcccaacttatggcgtactgaacatgaactgcggaagtgttatgtatgaaccacaaagtttagaagctccaaaaggatttccacaaggtggcccagttgatggacaaatagcttccgcaggtggtaaatttggtggtattctagatcaacaaacagcagatcgttggtttaaaaatacgataactggtggagagaatacgtttacatggaaatatacagctcctcacttaactagccaatggcattactacattacgaaaaagaattggaatccaaataaaccgctaacaagagctgactttgagccaattggaactgtacaacatgatggttctgcagcttcaaacaatttaaatcacaaaattaacgtacctactgatcgtagtggataccatgttattttagcggtatgggatgtagctgatacagcaaatgcattctataatgtaattgatgtaaatctagtcaataatgaaaaaccagacacagaagcaccaagtaatccaaatgggcttgaggcaagaaaagttacagcaaatagtgtagaactagcatggaacgcttctacggataatgtaggggtaaaaggttatcaggtcctacgcaatggagagattattgacacagtaccaggcactcattttattgataaacaattacaaccaagtactgaatactcttatactgtaaaagcgattgacgcagctggaaatgtatcgaaggtaagtacggcagttaaagtgaaaacatcagtagcgactcttgatacagaagcacctacacagccaaaaggattacacagcatgggaacgacagcatcaagcgttgatctgatgtggagtccgtctgacgataatgacggtgtagaccattacgatatctacagagaaatatcaggcgtaatgaaaaaaattggaatatccaacactacttctcatatggacaaaaatttgcttgctaatactacatataaatatacggtgaaagctgttgatgtggctggaaatgaatcagcacaaagcgatgtattcacagttactacaaaaactgaaagcgcttcatacgaagcgtgggattcaaagaaggcatataaaaagggagatagagtcgtacacgaagggaaagtgtatgaagctgtccaaaattatcaaggaaatggggatccaaactggatttatgctttatcattatggaaaacagtgtaa

SEQ ID NO: 26 - protein, 455 aa, Bacillus weihenstephanensis
MNNRILKHLQNMKMNKKSLGAVALTAGIIGTTLIPQNAYAHGFVEKPGSRSALCSPTYGVLNMNCGSVMYEPQSLEAPKGFPQGGPVDGQIASAGGKFGGILDQQTADRWFKNTITGGENTFTWKYTAPHLTSQWHYYITKKNWNPNKPLTRADFEPIGTVQHDGSAASNNLNHKINVPTDRSGYHVILAVWDVADTANAFYNVIDVNLVNNEKPDTEAPSNPNGLEARKVTANSVELAWNASTDNVGVKGYQVLRNGEIIDTVPGTHFIDKQLQPSTEYSYTVKAIDAAGNVSKVSTAVKVKTSVATLDTEAPTQPKGLHSMGTTASSVDLMWSPSDDNDGVDHYDIYREISGVMKKIGISNTTSHMDKNLLANTTYKYTVKAVDVAGNESAQSDVFTVTTKTESASYEAWDSKKAYKKGDRVVHEGKVYEAVQNYQGNGDPNWIYALSLWKTV

SEQ ID NO: 27 - DNA, 1404 bp, Bacillus thuringiensis
gtgaagaaattagtaagggggactattaaaatgaacaaaaaattctttaagcagttaaaaaaaatggctacaaataaaaaaggattaagtgccgctgcagtagcagtaggaattatgggtacaactttaattcctcaaaatgcctatgcacatgggttcgttgaaaagccaggtagccgtgctgctttatgcagtcaaaattatggggcgttgaattcaaattgtggaaatataatgtatgaaccgcaaagcttagaagcacctaaaggattcccgcaaggcgggccagctgatgggaaaattgcttcagcgggaggtctatttggtggaattcttgatcaacaaacagctgatcgatggtttaagaatactattaagggcggggagaatacattcacttggaaatatactgctcctcattcaacaagtcagtggcactattacattacaaaaaaaggatggaatccaaataaacctttaacaagaatggattttgaaccaataggaactgtaaaacacgatggttctgcagcatctaataatctatcacataaaatcaatgtaccaactgatcgcagtggatatcatgtcatattagcagtttgggatgtagctgatactgtaaatgctttctataatgtgatcgatgtgaatctaataaataatgaaaaaacagatacagaagcgccaactcagccatctggagtacaagtcgtaaaagctacttcaaatagtgtagaacttagttggaagcctgcaatcgataatgtaggggtcaaagaatatcaagtattacgtaatggtcaattaattaatactatagtgggtacaagtgtagttgataaaaaattaagcccgaacactgggtatacgtatacagtaaaagcagtagacgctgcagggaatatatcaagggaaagtgaagcattagttgttaaaacaacagtggaaaaaccagatacagaagcaccaactcagcctaaaggattacacagcatgggaaccactacgaatagtatcgacttaatgtggagtccgtctgaagataacatagatgtgaatcattatattgtctacagagaagttgggggtgttatgaaagaattaggcactgctaatacaacttcatttatggacaaagatttgcaagcgaatacaatatataagtatgtagtttctgctgttgattcagctggcaatgaatcaatgaaaagtgatgccttaacaattgctacaaaaggacaagaaaacacttatgaacaatggggtgagtataaagcgtataaaaaaggggataaagtagttcatgagggtaaggtttacgaggcagttcaaagttatcaagggaatggagatccaaactggatttttgctttgtcattatggaatgaagtaaataaataa

SEQ ID NO: 28 - protein, 467 aa, Bacillus thuringiensis
MKKLVRGTIKMNKKFFKQLKKMATNKKGLSAAAVAVGIMGTTLIPQNAYAHGFVEKPGSRAALCSQNYGALNSNCGNIMYEPQSLEAPKGFPQGGPADGKIASAGGLFGGILDQQTADRWFKNTIKGGENTFTWKYTAPHSTSQWHYYITKKGWNPNKPLTRMDFEPIGTVKHDGSAASNNLSHKINVPTDRSGYHVILAVWDVADTVNAFYNVIDVNLINNEKTDTEAPTQPSGVQVVKATSNSVELSWKPAIDNVGVKEYQVLRNGQLINTIVGTSVVDKKLSPNTGYTYTVKAVDAAGNISRESEALVVKTTVEKPDTEAPTQPKGLHSMGTTTNSIDLMWSPSEDNIDVNHYIVYREVGGVMKELGTANTTSFMDKDLQANTIYKYVVSAVDSAGNESMKSDALTIATKGQENTYEQWGEYKAYKKGDKVVHEGKVYEAVQSYQGNGDPNWIFALSLWNEVNK

SEQ ID NO: 29 - DNA, 1371 bp, Bacillus cereus
atgaataaaaaaattttagggcagtttagaaaaatggctacaaataaaaaaggattaagtgctgctgcagtagcagtgggaattatgagtacaactcttattcctcaaaatacctatgcacatgggtttgttgaaaagccaggtagccgtgcagctttatgcagtcaaaattatggggcgctaaattcaaattgtggaaatataatgtatgaaccacaaagtttagaagctcctaaaggattcccacagggtggaccagcagacgggaaaattgcttcagcaggaggcctgtttggtgggattcttgatcaacaaacagctgatcgatggtttaagaatacgattaaaggcggagaaaacacctttacttggaaatacacagctcctcattcaacaagtcaatggcactattacatcacgaaaaagggatggaatccaaataaacctttaacaagagcagattttgagccaattggtactgtaaaacacgatggttctaaagcatctaataatttatcacataaaatcaatgtaccaactgatcgcagtgggtaccatgttattttagctgtttgggatgtagctgatactgtaaacgctttctataatgtaatcgatgtgaatctaataaatgatgaaaaaccagatacagaagcaccagctcagccatctggactacaagtagtaaaaactacctcaaatagtgtagaacttaattggaaacccgcaacagacaatgtaggagtgaaagaatatcaagtgctacgtaatggagaactaattaatactgtagtcggtacaagtgtaattgataaaaaattaaacccaaacacagaatatacgtatacagtaagagcagtagatgctgcaggaaatatatctgagaaaagtgaagcattagttattaaaacaacagaggaaaaaccagatacagaagcaccaactcaacctaaaggattacacagtatgggaactactacgagtagtattgatttaatgtggagtccatcggaggataatgtagatgtgagccattatattgtatacagagaagttggaggggccatgaaagaaataggtactgctaatacaacttcatttatggacaaagatttgcaagcgaatacagtatataagtatgtagtatctgctgtcgatacatctggtaatgaatcaatgaaaagtgatgccatcactgttacaacaaaaggacaagaaaactcttatgaacaatgggatgcgcgtaaagcgtataaagcaggagatagagtagttcatgagaataaggtgtatgaggcagttcagagttatcaagggaatggggatccaaattggatttttgcattgtcattatggaaagaagtaaactaa

SEQ ID NO: 30 - protein, 456 aa, Bacillus cereus
MNKKILGQFRKMATNKKGLSAAAVAVGIMSTTLIPQNTYAHGFVEKPGSRAALCSQNYGALNSNCGNIMYEPQSLEAPKGFPQGGPADGKIASAGGLFGGILDQQTADRWFKNTIKGGENTFTWKYTAPHSTSQWHYYITKKGWNPNKPLTRADFEPIGTVKHDGSKASNNLSHKINVPTDRSGYHVILAVWDVADTVNAFYNVIDVNLINDEKPDTEAPAQPSGLQVVKTTSNSVELNWKPATDNVGVKEYQVLRNGELINTVVGTSVIDKKLNPNTEYTYTVRAVDAAGNISEKSEALVIKTTEEKPDTEAPTQPKGLHSMGTTTSSIDLMWSPSEDNVDVSHYIVYREVGGAMKEIGTANTTSFMDKDLQANTVYKYVVSAVDTSGNESMKSDAITVTTKGQENSYEQWDARKAYKAGDRVVHENKVYEAVQSYQGNGDPNWIFALSLWKEVN

SEQ ID NO: 31 - DNA, 1368 bp, Bacillus thuringiensis
atgaataatcgatttttaaaacaactacaaaatatgaaaatgaacaaaaaaagtttaggagctgtagcattaacagctggaattattagtacgacacttattcctcaaaatgcttatgcgcacggttttgttgaaaagcccggtagccgatccgctttatgtagttcaacttatggtgcgctaaatgtaaactgtggaagtgttatgtatgaaccacaaagtttagaagctccaaaaggtttcccacaaggtggtccagtagatggacaaattgcttcagcaggcggaaaatttggtggtattttagatcaacaaacagcaaatcgttggtttaaaaatacaattactggtggggaaaatacatttacttggaagtatactgcgcctcacttaacgagtaagtggcattactatattaccaaaaaaggatggaatccaaataaagcgctaacaagagcagatttcgaaccaattggaactgtacaacatgatggttctgcagcttcaaataatttaactcataaaatcaatatacctactgatcgtagtggatatcatgtgattttagcagtatgggatgtagctgatacagcaaatgcattctataatgtaattgatgttaatcttattaatgatgtgaaaccagacatagaagcgccaagtattccaaatggacttcagacgcaaaaagtaacagcgaatagtgtagaactaacatggaacgcttctacggataatgtaggggtaaaaggatatcaaatcttccgaaacggagagatgatcgatacagtactaggcactcattttattgataagaaattacaaccaagcacagaatactcttatactgtaaaagcaattgactcagctggaaatgtatcgaaagaaagtacagcgcttacagtaaaaacaacagatgagattcctgatacagaagcaccaacacaaccaaaaggattacatagtatgggaacgacagcgtcaagtgtggatttaatgtggagtccatctgacgataatattggtgtagaccattacgatatttatagagaaacagaaggatcaatgaaaaagattgcaacatccaatacaacttcttatatggataaaaatctgctcgctaatactacttataaatatgtagtaaaagctgttgatgtagctggaaatgaatccgtacagagtgatatattcacaattactacaaaaaccgaaagcgcttcatatgaagcgtgggatgcaaaaaaagcatataaaaagggagatagagttctacacgaaggaaaagtatatgaagcagtccagagttatcaaggaaatggtgatccgaactggatttatgcattatcattatggaaaacagtgtaa

SEQ ID NO: 32 - protein, 455 aa, Bacillus thuringiensis
MNNRFLKQLQNMKMNKKSLGAVALTAGIISTTLIPQNAYAHGFVEKPGSRSALCSSTYGALNVNCGSVMYEPQSLEAPKGFPQGGPVDGQIASAGGKFGGILDQQTANRWFKNTITGGENTFTWKYTAPHLTSKWHYYITKKGWNPNKALTRADFEPIGTVQHDGSAASNNLTHKINIPTDRSGYHVILAVWDVADTANAFYNVIDVNLINDVKPDIEAPSIPNGLQTQKVTANSVELTWNASTDNVGVKGYQIFRNGEMIDTVLGTHFIDKKLQPSTEYSYTVKAIDSAGNVSKESTALTVKTTDEIPDTEAPTQPKGLHSMGTTASSVDLMWSPSDDNIGVDHYDIYRETEGSMKKIATSNTTSYMDKNLLANTTYKYVVKAVDVAGNESVQSDIFTITTKTESASYEAWDAKKAYKKGDRVLHEGKVYEAVQSYQGNGDPNWIYALSLWKTV

SEQ ID NO: 33 - DNA, 1374 bp, Bacillus cereus
atgaacatgaataatcgatttttaaaacaactacaaaatatgaaaatgaacaaaaaaagtttaggagctgtagcattaacagctggaattattagtacgacacttattcctcaaaatgcttatgcgcacggttttgttgaaaagcccggtagccgatccgctttatgtagttcaacttatggtgcgctaaatgtaaactgtggaagtgttatgtatgaaccacaaagtttagaagctccaaaaggtttcccacaaggtggtccagtagatggacaaattgcttcagcaggcggaaaatttggtggtattttagatcaacaaacagcaaatcgttggtttaaaaatacaatcactggtggggaaaatacatttacttggaagtatactgcgcctcacttaacgagtaagtggcattactatattactaaaaaaggatggaatccaaataaagcgctaacaagagcagattttgaaccaattggaactgtacaacatgatggttctgcagcttcaaataatttaactcataaaatcaatgtacctactgatcgtagtggatatcatgtgattttagcagtatgggatgtagctgatacagcaaatgcattctataatgtaattgatgttaatcttattaatgatgtgaaaccagacatagaagcgccaagtattccaaatggacttcagacgcaaaaagtaacagcaaatagtgtagaactaacatggaacgcttctacggataatgtaggggtaaaaggatatcaaatcttccgtaacggagagatgattgatacagtaataggcactcattttattgataagaaattacaaccaagcacagaatactcttatactgtaaaagcaattgacgcagctggcaatgtatcgaaggaaagtacagcgcttacagtaaaaacaacagttgagattcctgatacagaagcaccaacacaaccaaaaggattacatagtatgggaacgacagcgtcaagtgtggatttaatgtggagtccatctgacgataatattggtgtagaccattacgatatttatagagaaacagaaggatcaatgaaaaagattgcaacatccaatacagcttcttatatggataaaaatctgctcgctaatactacttataaatatgtagtaaaagctgttgatgtagctggaaatgaatccgtacagagtgatatattcacaattactacaaaaaccgaaagcgcttcatatgaagcgtgggatgcaaaaaaagcatataaaaagggagatagagttctacacgaaggaaaagtatatgaagcagtccagagttatcaaggaaatggtgatccgaactggatttatgcattatcattatggaaaacagtgtaa

SEQ ID NO: 34 - protein, 457 aa, Bacillus cereus
MNMNNRFLKQLQNMKMNKKSLGAVALTAGIISTTLIPQNAYAHGFVEKPGSRSALCSSTYGALNVNCGSVMYEPQSLEAPKGFPQGGPVDGQIASAGGKFGGILDQQTANRWFKNTITGGENTFTWKYTAPHLTSKWHYYITKKGWNPNKALTRADFEPIGTVQHDGSAASNNLTHKINVPTDRSGYHVILAVWDVADTANAFYNVIDVNLINDVKPDIEAPSIPNGLQTQKVTANSVELTWNASTDNVGVKGYQIFRNGEMIDTVIGTHFIDKKLQPSTEYSYTVKAIDAAGNVSKESTALTVKTTVEIPDTEAPTQPKGLHSMGTTASSVDLMWSPSDDNIGVDHYDIYRETEGSMKKIATSNTASYMDKNLLANTTYKYVVKAVDVAGNESVQSDIFTITTKTESASYEAWDAKKAYKKGDRVLHEGKVYEAVQSYQGNGDPNWIYALSLWKTV

SEQ ID NO: 35 - DNA, 1374 bp, Bacillus cereus
atgaacatgaataatcgatttttaaaacaactacaaaatatgaaaatgaacaaaaaaagtttaggagttgtagcattaacagctggaattattagtacgacacttattcctcaaaatgcttatgcgcacggttttgttgaaaagcccggtagccgatccgctttatgtagtccaacttatggtgcgctaaatgtaaactgtggaagtgttatgtatgaaccacaaagtttagaagctccaaaagggttcccacaaggtggtccagtagatggacaaattgcttcagcaggcggaaaatttggtggtattttagatcaacaaacagcaaatcgttggtttaaaaatacaatcactggtggggaaaatacatttacttggaagtatactgcgcctcacttaacgagtaagtggcattactatattactaaaaaaggatggaatccaaataaagcgctaacaagagcagatttcgaaccaattggaactgtacaacatgatggttctgcagcttcaaataatttaactcataaaatcaatgtacctactgatcgtagtggatatcatgtgattttagcagtatgggatgtagctgatacagcaaatgcattctataatgtaattgatgttaatcttattaatgatgtgaaaccagacatagaagcaccaagtattccaaatggacttcagacgcaaaaagtaacagcgaatagtgtagaactaacatggaacgcttctacggataatgtaggggtaaaaggatatcaaatcttccgtaacggagagatgattgatacagtaccagggactcattttattgataagaagttacaaccaagtacagaatactcttatactgtaaaagcaattgacgcagctggcaatgtatcgacagaaagtacagcgcttacagtaaaaacgacagttgagactcctgatacagaagcaccaacacaaccaaaaggattacatagtatgggaacgacagcgtcaagtgtggatttaatgtggagtccatctgacgataatattggtgtagaccattatgatatttatagagaaacagaaggatcaatgaaaaagattgcaacatccaatacaacttcttatttggataaaaatctgctcgctaatactacttataaatatgtagtgaaagctgttgatgtagctggaaatgaatccgtacagagtgatatattcacaattactacaaaaaccgaaagcgcttcatatgaagcgtgggatgcaaaaaaagcatataaaaagggagatagagttctacacgaaggaaaagtatatgaagcagtccagagttatcaaggaaatggtgatccaaactggatttatgcattatcattatggaaaacagtgtaa

SEQ ID NO: 36 - protein, 457 aa, Bacillus cereus
MNMNNRFLKQLQNMKMNKKSLGVVALTAGIISTTLIPQNAYAHGFVEKPGSRSALCSPTYGALNVNCGSVMYEPQSLEAPKGFPQGGPVDGQIASAGGKFGGILDQQTANRWFKNTITGGENTFTWKYTAPHLTSKWHYYITKKGWNPNKALTRADFEPIGTVQHDGSAASNNLTHKINVPTDRSGYHVILAVWDVADTANAFYNVIDVNLINDVKPDIEAPSIPNGLQTQKVTANSVELTWNASTDNVGVKGYQIFRNGEMIDTVPGTHFIDKKLQPSTEYSYTVKAIDAAGNVSTESTALTVKTTVETPDTEAPTQPKGLHSMGTTASSVDLMWSPSDDNIGVDHYDIYRETEGSMKKIATSNTTSYLDKNLLANTTYKYVVKAVDVAGNESVQSDIFTITTKTESASYEAWDAKKAYKKGDRVLHEGKVYEAVQSYQGNGDPNWIYALSLWKTV

SEQ ID NO: 37 - DNA, 1320 bp, Bacillus cereus
atgaataaaaaaattttagggcagtttagaaaaatggctacaaataaaaaaggattaagtgctgctgcagtagcagtgggaattatgagtacaactcttattcctcaaaatgcctatgcacatgggtttgttgaaaagccaggtagccgtgcagctttatgcagtcaaaattatggggcgctaaattcaaattgtggaaatataatgtatgaaccacaaagtttagaagctcctaaaggattcccacagggtggaccagcagacgggaaaattgcttcagcaggaggcctgtttggtgggattcttgatcaacaaacagctgatcgatggtttaagaatacgattaaaggcggagaaaacacctttacttggaaatacacagctcctcattcaacaagtcaatggcactattacatcacgaaaaagggatggaatccaaataaccctttaacaagagcagattttgagccaattggtactgtaaagcacgatggttctaaagcatctaataatttatcacataaaatcaatgtaccaactgatcgcagtgggtaccatgttattttagctgtttgggatgtagctgatactgtaaacgctttctataatgtaatcgatgtgaatctaataaatgatgaaaaaccagatacagaagcaccagctcagccatctggactacaagtagtaaaaactacctcaaatagtgtagaacttaattggaaacccgcaacagacaatgtaggagtgaaagaatatcaagtgctacgtaatggagaactaattaatactgtagtcggtacaagtgtaattgataaaaaattaaacccaaacacagaatatacgtatacagtaagagcagtagatgctgcaggaaatatatctgagaaaagtgaagcattagttattaaaacaacagaggaaaaaccagatacagaagcaccaactcaacctaaaggattacacagtatgggaactactacgagtagtattgatttaatgtggagtccatcggaggataatgtagatgtgagccattatattgtatacagagaagttggaggggccatgaaagaaataggtactgctaatacaacttcatttatggacaaagatttgcaagcgaatacagcatataagtatgtagtatctgctgtcgatacatctggtaatgaatcaatgaaaagtgatgccatcacagttactacaaaaggacaagaaaactcttatgaacaatgggatgcgcgtaaagcgtataaagcaggagatagagtagttcatgaggataaggtgtatgaggcagttcagagttatcaagggaat

SEQ ID NO: 38 - protein, 456 aa, Bacillus cereus
MNKKILGQFRKMATNKKGLSAAAVAVGIMSTTLIPQNAYAHGFVEKPGSRAALCSQNYGALNSNCGNIMYEPQSLEAPKGFPQGGPADGKIASAGGLFGGILDQQTADRWFKNTIKGGENTFTWKYTAPHSTSQWHYYITKKGWNPNNPLTRADFEPIGTVKHDGSKASNNLSHKINVPTDRSGYHVILAVWDVADTVNAFYNVIDVNLINDEKPDTEAPAQPSGLQVVKTTSNSVELNWKPATDNVGVKEYQVLRNGELINTVVGTSVIDKKLNPNTEYTYTVRAVDAAGNISEKSEALVIKTTEEKPDTEAPTQPKGLHSMGTTTSSIDLMWSPSEDNVDVSHYIVYREVGGAMKEIGTANTTSFMDKDLQANTAYKYVVSAVDTSGNESMKSDAITVTTKGQENSYEQWDARKAYKAGDRVVHEDKVYEAVQSYQGNGDPNWIFALSLWKEVN

SEQ ID NO: 39 - DNA, 1368 bp, Bacillus weihenstephanensis
atgaataatcgatttttaaaacaactacaaaacttgaaaatgaacaaaaaaagtataggagctgttgcattaacagctggaattatcggcacgacacttattcctcaaaatgcatacgcgcacggctttgttgaaaagcctggtagccgttccgctttatgtagtccaacttatggtgctctaaatgtaaactgtggaagtgttatgtatgaaccacaaagtttagaagctccaaaaggattcccacaaggtggcccagttgatgggcaaatcgcttctgcaggtggaaaatttggcggtattttagatcaacaaacagcaaatcgttggtttaaaaatacaatcactggtggggaaaatacatttacttggaagtatacagcacctcacttaacaagcaaatggcactactatattacaaaaaaaggatggaatccaaataaagcactaacaagagcagactttgagccaattggcactgtacaacatgatggttctgcagcttcaaataatttaactcataaaatcaatgtacctactgaccgtagtggatatcatgtgattttagctgtatgggatgtagctgatacagcaaatgcgttctataatgtaattgatgtgaatctcatcaataatgtgaaaccagacacagaagctccaagtattccaaatggacttcaggcgcaaaaagtaacagcaaatagtatagagctaacatggaacacttctacggataatgtagggatgaaaggatatcaagttttccgtaacggagagatgattgacactgtactaggcactcattttattaataaacaattaaaaccaagtacagaatacacttatactgtaaaagcaattgacacagctggcaatgtatcgaaagaaagtacagcgcttacagtgaaaacaacagttgaggctcctgatacagaagcaccaacacaaccaaaaggattacatagcatgggaacaacagcgtcaagtgtggatctaatgtggagcccatctgatgataacgttggagtagactattacgatatttatagagaaatagaaggaacaatgaaaaaaattgcaacatccaatacgacttcttatatggataaaaatttactcgctaatactacttataaatatgcagtgaaagcagtggatgtagttggaaatgaatccgtacaaagtgatacattcacaattactacaaaaactgaaagcgcttcatatgaagcgtgggatgcaaagaaagcatataaaaagggagatagagttttacacgagggaaaagtgtatgaagcagtccagaattatgaaggacatggggatccaaactggatttttgctttatccttatggaaaacagtgtaa

SEQ ID NO: 40 - protein, 455 aa, Bacillus weihenstephanensis
MNNRFLKQLQNLKMNKKSIGAVALTAGIIGTTLIPQNAYAHGFVEKPGSRSALCSPTYGALNVNCGSVMYEPQSLEAPKGFPQGGPVDGQIASAGGKFGGILDQQTANRWFKNTITGGENTFTWKYTAPHLTSKWHYYITKKGWNPNKALTRADFEPIGTVQHDGSAASNNLTHKINVPTDRSGYHVILAVWDVADTANAFYNVIDVNLINNVKPDTEAPSIPNGLQAQKVTANSIELTWNTSTDNVGMKGYQVFRNGEMIDTVLGTHFINKQLKPSTEYTYTVKAIDTAGNVSKESTALTVKTTVEAPDTEAPTQPKGLHSMGTTASSVDLMWSPSDDNVGVDYYDIYREIEGTMKKIATSNTTSYMDKNLLANTTYKYAVKAVDVVGNESVQSDTFTITTKTESASYEAWDAKKAYKKGDRVLHEGKVYEAVQNYEGHGDPNWIFALSLWKTV

SEQ ID NO: 41 - DNA, 1368 bp, Bacillus cereus
atgaataatcgatttttaaaacaactacaaaatatgaaaatgaacaaaaaaagtttaggagctgtagcattaacagctggaattattagtacgacacttattcctcaaaatgcttatgcgcacggttttgttgaaaagcccggtagccgatccgctttatgtagttcaacttatggtgcgctaaatgtaaactgtggaagtgttatgtatgaaccacaaagtttagaagctccaaaaggtttcccacaaggtggtccagtagatggacaaattgcttcagcaggcggaaaatttggtggtattttagatcaacaaacagcaaatcgttggtttaaaaatacaatcactggtggggaaaatacatttacttggaagtatactgcgcctcacttaacgagtaagtggcattactatattactaaaaaaggatggaatccaaataaagcgctaacaagagcagattttgaaccaattggaactgtacaacatgatggttctgcagcttcaaataatttaactcataaaatcaatgtacctactgatcgtagtggatatcatgtgattttagcagtatgggatgtagctgatacagcaaatgcattctataatgtaattgatgttaatcttattaatgatgtgaaaccagacatagaagcgccaagtattccaaatggacttcagacgcaaaaagtaacagcaaatagtgtagaactaacatggaacgcttctacggataatgtaggggtaaaaggatatcaaatcttccgtaacggagagatgattgatacagtaataggcactcattttattgataagaaattacaaccaagcacagaatactcttatactgtaaaagcaattgacgcagctggcaatgtatcgaaggaaagtacagcgcttacagtaaaaacaacagttgagattccagatacagaagcaccaacacaaccaaaaggattacatagtatgggaacgacagcgtcaagtgtggatttaatgtggagtccatctgacgataatattggtgtagaccattacgatatttatagagaaacagaaggatcaatgaaaaagattgcaacatccaatacaacttcttatatggataaaaatctgctcgctaatactacttataaatatgtagtaaaagctgttgatgtagctggaaatgaatccgtacagagtgatatattcacaattactacaaaaaccgaaatcgcttcatatgaagcgtgggatgcaaaaaaagcatataaaaagggagatagagttctacacgaaggaaaagtatatgaagcagtccagagttatcaaggaaatggtgatccgaactggatttatgcattatcattatggaaaacagtgtaa

SEQ ID NO: 42 - protein, 455 aa, Bacillus cereus
MNNRFLKQLQNMKMNKKSLGAVALTAGIISTTLIPQNAYAHGFVEKPGSRSALCSSTYGALNVNCGSVMYEPQSLEAPKGFPQGGPVDGQIASAGGKFGGILDQQTANRWFKNTITGGENTFTWKYTAPHLTSKWHYYITKKGWNPNKALTRADFEPIGTVQHDGSAASNNLTHKINVPTDRSGYHVILAVWDVADTANAFYNVIDVNLINDVKPDIEAPSIPNGLQTQKVTANSVELTWNASTDNVGVKGYQIFRNGEMIDTVIGTHFIDKKLQPSTEYSYTVKAIDAAGNVSKESTALTVKTTVEIPDTEAPTQPKGLHSMGTTASSVDLMWSPSDDNIGVDHYDIYRETEGSMKKIATSNTTSYMDKNLLANTTYKYVVKAVDVAGNESVQSDIFTITTKTEIASYEAWDAKKAYKKGDRVLHEGKVYEAVQSYQGNGDPNWIYALSLWKTV

SEQ ID NO: 43 - DNA, 1368 bp, Bacillus cereus
atgaataatcgatttttaaaacaactacaaaatatgaaaatgaacaaaaaaagtttaggagctgtagcattaacagctggaattattagtacgacacttattcctcaaaatgcttatgcgcacggttttgttgaaaagcccggtagccgatccgctttatgtagttcaacttatggtgcgctaaatgtaaactgtggaagtgttatgtatgaaccacaaagtttagaagctccaaaaggtttcccacaaggtggtccagtagatggacaaattgcttcagcaggcggaaaatttggtggtattttagatcaacaaacagcaaatcgttggtttaaaaatacaatcactggtggggaaaatacatttacttggaagtatactgcgcctcacttaacgagtaagtggcattactatattactaaaaaaggatggaatccaaataaagcgctaacaagagcagattttgaaccaattggaactgtacaacatgatggttctgcagcttcaaataatttaactcataaaatcaatgtacctactgatcgtagtggatatcatgtgattttagcagtatgggatgtagctgatacagcaaatgcattctataatgtaattgatgttaatcttattaatgatgtgaaaccagacatagaagcgccaagtattccaaatggacttcagacgcaaaaagtaacagcaaatagtgtagaactaacatggaacgcttctacggataatgtaggggtaaaaggatatcaaatcttccgtaacggagagatgattgatacagtaataggcactcattttattgataagaaattacaaccaagcacagaatactcttatactgtaaaagcaattgacgcagctggcaatgtatcgaaggaaagtacagcgcttacagtaaaaacaacagttgagattcctgatacagaagcaccaacacaaccaaaaggattacatagtatgggaacgacagcgtcaagtgtggatttaatgtggagtccatctgacgataatattggtgtagaccattacgatatttatagagaaacagaaggatcaatgaaaaagattgcaacatccaatacagcttcttatatggataaaaatctgctcgctaatactacttataaatatgtagtaaaagctgttgatgtagctggaaatgaatccgtacagagtgatatattcacaattactacaaaaaccgaaagcgcttcatatgaagcgtgggatgcaaaaaaagcatataaaaagggagatagagttctacacgaaggaaaagtatatgaagcagtccagagttatcaaggaaatggtgatccgaactggatttatgcattatcattatggaaaacagtgtaa

SEQ ID NO: 44 - protein, 455 aa, Bacillus cereus
MNNRFLKQLQNMKMNKKSLGAVALTAGIISTTLIPQNAYAHGFVEKPGSRSALCSSTYGALNVNCGSVMYEPQSLEAPKGFPQGGPVDGQIASAGGKFGGILDQQTANRWFKNTITGGENTFTWKYTAPHLTSKWHYYITKKGWNPNKALTRADFEPIGTVQHDGSAASNNLTHKINVPTDRSGYHVILAVWDVADTANAFYNVIDVNLINDVKPDIEAPSIPNGLQTQKVTANSVELTWNASTDNVGVKGYQIFRNGEMIDTVIGTHFIDKKLQPSTEYSYTVKAIDAAGNVSKESTALTVKTTVEIPDTEAPTQPKGLHSMGTTASSVDLMWSPSDDNIGVDHYDIYRETEGSMKKIATSNTASYMDKNLLANTTYKYVVKAVDVAGNESVQSDIFTITTKTESASYEAWDAKKAYKKGDRVLHEGKVYEAVQSYQGNGDPNWIYALSLWKTV

SEQ ID NO: 45 - DNA, 1368 bp, Bacillus cereus
atgaataatcgatttttaaaacaactacaaaatatgaaaatgaacaaaaaaagtttaggagttgtagcattaacagctggaattattagtacgacacttattcctcaaaatgcttatgcgcacggttttgttgaaaagcccggtagccgatccgctttatgtagtccaacttatggtgcgctaaatgtaaactgtggaagtgttatgtatgaaccacaaagtttagaagctccaaaagggttcccacaaggtggtccagtagatggacaaattgcttcagcaggcggaaaatttggtggtattttagatcaacaaacagcaaatcgttggtttaaaaatacaatcactggtggggaaaatacatttacttggaagtatactgcgcctcacttaacgagtaagtggcattactatattactaaaaaaggatggaatccaaataaagcgctaacaagagcagatttcgaaccaattggaactgtacaacatgatggttctgcagcttcaaataatttaactcataaaatcaatgtacctactgatcgtagtggatatcatgtgattttagcagtatgggatgtagctgatacagcaaatgcattctataatgtaattgatgttaatcttattaatgatgtgaaaccagacatagaagcaccaagtattccaaatggacttcagacgcaaaaagtaacagcgaatagtgtagaactaacatggaacgcttctacggataatgtaggggtaaaaggatatcaaatcttccgtaacggagagatgattgatacagtaccagggactcattttattgataagaagttacaaccaagtacagaatactcttatactgtaaaagcaattgacgcagctggcaatgtatcgacagaaagtacagcgcttacagtaaaaacgacagttgagactcctgatacagaagcaccaacacaaccaaaaggattacatagtatgggaacgacagcgtcaagtgtggatttaatgtggagtccatctgacgataatattggtgtagaccattatgatatttatagagaaacagaaggatcaatgaaaaagattgcaacatccaatacaacttcttatttggataaaaatctgctcgctaatactacttataaatatgtagtgaaagctgttgatgtagctggaaatgaatccgtacagagtgatatattcacaattactacaaaaaccgaaagcgcttcatatgaagcgtgggatgcaaaaaaagcatataaaaagggagatagagttttacacgaaggaaaagtatatgaagcagtccagagttatcaaggaaatggtgatccaaactggatttatgcattatcattatggaaaacagtgtaa

SEQ ID NO: 46 - protein, 455 aa, Bacillus cereus
MNNRFLKQLQNMKMNKKSLGVVALTAGIISTTLIPQNAYAHGFVEKPGSRSALCSPTYGALNVNCGSVMYEPQSLEAPKGFPQGGPVDGQIASAGGKFGGILDQQTANRWFKNTITGGENTFTWKYTAPHLTSKWHYYITKKGWNPNKALTRADFEPIGTVQHDGSAASNNLTHKINVPTDRSGYHVILAVWDVADTANAFYNVIDVNLINDVKPDIEAPSIPNGLQTQKVTANSVELTWNASTDNVGVKGYQIFRNGEMIDTVPGTHFIDKKLQPSTEYSYTVKAIDAAGNVSTESTALTVKTTVETPDTEAPTQPKGLHSMGTTASSVDLMWSPSDDNIGVDHYDIYRETEGSMKKIATSNTTSYLDKNLLANTTYKYVVKAVDVAGNESVQSDIFTITTKTESASYEAWDAKKAYKKGDRVLHEGKVYEAVQSYQGNGDPNWIYALSLWKTV

SEQ ID NO: 47 - DNA, 1374 bp, Bacillus cereus
atgaacatgaataatcgatttttaaaacaactacaaaatatgaaaatgaacaaaaaaagtttaggagctgtagcattaacagctggaattattagtacgacacttattcctcaaaatgcttatgcgcacggttttgttgaaaagcctggtagccgatctgctttatgtagtccaacttatggtgcgctaaatgtaaactgtggaagtgttatgtatgaaccacaaagtttagaagctccaaaagggttcccacaaggtggtccagtagatggacaaattgcttcagcaggcggaaaatttggtggtattttagatcaacaaacagcaaatcgttggtttaaaaatacaatcactggtggggaaaatacatttacttggaagtatactgcgcctcacttaacgagtaagtggcattactatattactaaaaaaggatggaatccaaataaagcgctaacaagagcagattttgaaccaattggaacagtacaacatgatggttctgcagcttcaaataatttaactcataaaatcaatgtacctactgatcgtagtggatatcatgtgattttagcagtatgggatgtagctgatacagcaaatgcattctataatgtaattgatgttaatcttattaatgatgtgaaaccagacatagaagcgccaagtattccaaatggacttcagacgcaaaaagtaacagcgaatagtgtagaactaacatggaacgcttctacggataatgtaggggtaaaaggatatcaaatcttccgtaacggagagatgattgatacagtactaggcactcattttattgataagaaattacaactaagtacagaatactcttatactgtaaaagcaattgatgcagctggcaatgtatcgaaagaaagtgcagcgcttacagtaaaaacgacagttgagactcctgatacagaagcaccaacacaaccaaaaggattacatagtatgggaacgacagcgtcaagtgtggatttaatgtggagtccatctgacgataatattggtgtagaccattatgatatttatagagaaacagaaggggcaatgaacaagattgcaacatccaatacaacttcttatttggataaaaatctgctcgctaatactacttataaatatgtagtaaaagctgttgatgtagctggaaatgaatccgtacagagtgatatattcacaattactacaaaaaccgaaagcgcttcatatgaagcgtgggatgcaaaaaaagcatataaaaagggagatagagttctgcacgaaggaaaagtatatgaagcagtccagagttatcaaggaaatggtgatccgaactggatttatgcattatcattatggaaaacagtgtaa

SEQ ID NO: 48 - protein, 457 aa, Bacillus cereus
MNMNNRFLKQLQNMKMNKKSLGAVALTAGIISTTLIPQNAYAHGFVEKPGSRSALCSPTYGALNVNCGSVMYEPQSLEAPKGFPQGGPVDGQIASAGGKFGGILDQQTANRWFKNTITGGENTFTWKYTAPHLTSKWHYYITKKGWNPNKALTRADFEPIGTVQHDGSAASNNLTHKINVPTDRSGYHVILAVWDVADTANAFYNVIDVNLINDVKPDIEAPSIPNGLQTQKVTANSVELTWNASTDNVGVKGYQIFRNGEMIDTVLGTHFIDKKLQLSTEYSYTVKAIDAAGNVSKESAALTVKTTVETPDTEAPTQPKGLHSMGTTASSVDLMWSPSDDNIGVDHYDIYRETEGAMNKIATSNTTSYLDKNLLANTTYKYVVKAVDVAGNESVQSDIFTITTKTESASYEAWDAKKAYKKGDRVLHEGKVYEAVQSYQGNGDPNWIYALSLWKTV

SEQ ID NO: 49 - DNA, 1368 bp, Bacillus cereus
atgaataatcgatttttaaaacaactacaaaacttgaaaatgaacaaaaaaagtataggagctgttgcattaacagctggaattatcagcacgacacttattcctcaaaatgcatacgcgcatggctttgttgaaaagcctggtagccgttccgctttatgtagtccaacttatggtgctctaaatgtaaactgcggaagtgttatgtatgaaccacaaagtttagaagctccaaaaggattcccacaaggtggcccagttgatgggcaaatcgcttctgcaggtggaaaatttggcggtattttagatcaacaaacagcaaatcgttggtttaaaaatacaatcactggtggggaaaatacatttacttggaagtatacagcacctcacttaacaagcaaatggcactactatattacaaaaaaaggatggaatccaaataaagcactaacaagagcagactttgagccaattggcactgtacaacatgatggttctgcagcttcaaataatttaactcataaaatcaatgtacctactgaccgtagtggatatcatgtgattttagctgtatgggatgtagctgatacagcaaatgcgttctataatgtaattgatgtgaatctcatcaataatgtgaaaccagacacagaagcgccaagtattccaaatggaattcaggcgcaaaaagtaacagcaaatagtatagaactaacatggaacacttctacggataatgtaggggtgaaaggatatcaagttttccgtaacggagagatgattgacactgtactaggcactcattttattaataaacaattaaaaccaagtacagaatacacttatactgtaaaagcaattgacgcagctggcaatgtatcgaaagaaagtacagcgcttacagtgaaaacaacagttgaggctcctgatacagaagcaccaacacaaccaaaaggattacatagcatgggaacaacagcgtcaagtgtggatctaatgtggagtccatctgatgataacgttggtgtagactattacgatatttatagagaaatagaaggaacaatgaaaagaattgcaacatccaatacgacttcttatatggataaaaatttactcgctaatactacttataaatatgcagtgaaagcagtggatgtagttggaaatgaatccgtacaaagtgatacgttcacaattaccacaaaatctgaaagcgcttcatatgaagcgtgggatgcaaagaaagcatataaaaagggagatagagttttacacgagagaaaagtgtatgaagcagtccagaattatgaaggacatggggatccaaactggatttttgctttatccttatggaaaacagtgtaa

SEQ ID NO: 50 - protein, 455 aa, Bacillus cereus
MNNRFLKQLQNLKMNKKSIGAVALTAGIISTTLIPQNAYAHGFVEKPGSRSALCSPTYGALNVNCGSVMYEPQSLEAPKGFPQGGPVDGQIASAGGKFGGILDQQTANRWFKNTITGGENTFTWKYTAPHLTSKWHYYITKKGWNPNKALTRADFEPIGTVQHDGSAASNNLTHKINVPTDRSGYHVILAVWDVADTANAFYNVIDVNLINNVKPDTEAPSIPNGIQAQKVTANSIELTWNTSTDNVGVKGYQVFRNGEMIDTVLGTHFINKQLKPSTEYTYTVKAIDAAGNVSKESTALTVKTTVEAPDTEAPTQPKGLHSMGTTASSVDLMWSPSDDNVGVDYYDIYREIEGTMKRIATSNTTSYMDKNLLANTTYKYAVKAVDVVGNESVQSDTFTITTKSESASYEAWDAKKAYKKGDRVLHERKVYEAVQNYEGHGDPNWIFALSLWKTV

SEQ ID NO: 51 - DNA, 1368 bp, Bacillus thuringiensis
atgaataatcgatttttaaaacaactacaaaatatgaaaatgaacaaaaaaagtttaggagctgtagcattaacagctggaattattagtacgacacttattcctcaaaatgcttatgcgcacggttttgttgaaaagcctggtagccgatctgctttatgtagtccaacttatggtgcgctaaatgtaaactgtggaagtgttatgtatgaaccacaaagtttagaagctccaaaagggttcccacaaggtggtccagtagatggacaaattgcttcagcaggcggaaaatttggtggtattttagatcaacaaacagcaaatcgttggtttaaaaatacaatcactggtggggaaaatacatttacttggaagtatactgcgcctcacttaacgagtaagtggcattactatattactaaaaaaggatggaatccaaataaagcgctaacaagagcagattttgaaccaattggaacagtacaacatgatggttctgcagcttcaaataatttaactcataaaatcaatgtacctactgatcgtagtggatatcatgtgattttagcagtatgggatgtagctgatacagcaaatgcattctataatgtaattgatgttaatcttattaatgatgtgaaaccagacatagaagcgccaagtattccaaatggacttcagacgcaaaaagtaacagcgaatagtgtagaactaacatggaacgcttctacggataatgtaggggtaaaaggatatcaaatcttccgtaacggagagatgattgatacagtaataggcactcattttattgataagaaattacaaccaagcacagaatactcttatactgtaaaagcaattgacgcagctggcaatgtatcgaaggaaagtacagcgcttacagtaaaaacaacagttgagattcctgatacagaagcaccaacacaaccaaaaggattacatagtatgggaacgacagcgtcaagtgtggatttaatgtggagtccatctgacgataatattggtgtagaccattacgatatttatagagaaacagaaggatcaatgaaaaagattgcaacatccaatacagcttcttatatggataaaaatctgctcgctaatactacttataaatatgtagtaaaagctgttgatgtagctggaaatgaatccgtacagagtgatatattcacaattactacaaaaaccgaaagcgcttcatatgaagcgtgggatgcaaaaaaagcatataaaaagggagatagagttctacacgaaggaaaagtatatgaagcagtccagagttatcaaggaaatggtgatccgaactggatttatgcattatcattatggaaaacagtgtaa

SEQ ID NO: 52 - protein, 455 aa, Bacillus thuringiensis
MNNRFLKQLQNMKMNKKSLGAVALTAGIISTTLIPQNAYAHGFVEKPGSRSALCSPTYGALNVNCGSVMYEPQSLEAPKGFPQGGPVDGQIASAGGKFGGILDQQTANRWFKNTITGGENTFTWKYTAPHLTSKWHYYITKKGWNPNKALTRADFEPIGTVQHDGSAASNNLTHKINVPTDRSGYHVILAVWDVADTANAFYNVIDVNLINDVKPDIEAPSIPNGLQTQKVTANSVELTWNASTDNVGVKGYQIFRNGEMIDTVIGTHFIDKKLQPSTEYSYTVKAIDAAGNVSKESTALTVKTTVEIPDTEAPTQPKGLHSMGTTASSVDLMWSPSDDNIGVDHYDIYRETEGSMKKIATSNTASYMDKNLLANTTYKYVVKAVDVAGNESVQSDIFTITTKTESASYEAWDAKKAYKKGDRVLHEGKVYEAVQSYQGNGDPNWIYALSLWKTV

SEQ ID NO: 53 - DNA, 1368 bp, Bacillus cereus
atgaataatcgatttttaaaacaactacaaaacatgaaaatgaacaaaaaaagtttaggagctgtagcattaacagctggaattattagtacgacacttattcctcaaaatgcttatgcgcacggttttgttgaaaagcccggtagccgatccgctttatgtagtccaacttatggtgcgctaaatgtaaactgcggaagtgttatgtatgaaccacaaagtttagaagctccaaaagggttcccacaaggtggtccagtagatggacaaattgcttcagcaggcggaaaatttggtggtattttagatcaacaaacagcaaatcgttggtttaaaaatacaatcactggtggggaaaatacatttacttggaagtatactgcgcctcacttaacgagtaagtggcattactatattactaaaaaaggatggaatccaaataaagcgctaacaagagcagattttgaaccaattggaactgtgcaacacgatggttctgcagcttcaaataatttaactcataaaattaatgtacctactgatcgtagtggatatcatgtgattttagcagtatgggatgtagctgatacagcaaatgcattctataatgtaattgatgttaatcttattaatgatgtgaaaccagacatagaagcgccaagtattccaaatggacttcagacgaaaaaagtaacagcgaatagtgtagaactaacatggaactcttctacggataatgtaggggtaaaaggatatcaaatcttccgtaacggagagatgatagatacaatactaggcactcattttattgataagaaattacaaccaagcacagaatactcttatactgtaaaagcaattgacgcagctggaaatgtatcgaaagaaagtacagcgcttacagtaaaaacaacagttgcgactcctgatacagaagcaccaacacaaccaaaaggattacatagtatgggaacgacagcatcaagtgtggatttaatgtggagtccatctgacgataacattggtgtagaccattatgatatttatagagaaatagaaggattaatgaaaaagattgcaacatccaatacaacttcttatatggataaaaatctgcttgctaatactacttataaatatgtagtgaaagctgttgatgtagctggaaatgaatccgtacagagtgatatattcacaattactacaaaagctgaaagcgcttcatatgaagcgtgggatgcaaaaaaagcatataaaaagggagatagagttctacacgaaggaaaagtatatgaagcagtccagagttatcaaggaaatggtgatccaaactggatttatgcattatcattatggaaaacagtgtaa

SEQ ID NO: 54 - protein, 455 aa, Bacillus cereus
MNNRFLKQLQNMKMNKKSLGAVALTAGIISTTLIPQNAYAHGFVEKPGSRSALCSPTYGALNVNCGSVMYEPQSLEAPKGFPQGGPVDGQIASAGGKFGGILDQQTANRWFKNTITGGENTFTWKYTAPHLTSKWHYYITKKGWNPNKALTRADFEPIGTVQHDGSAASNNLTHKINVPTDRSGYHVILAVWDVADTANAFYNVIDVNLINDVKPDIEAPSIPNGLQTKKVTANSVELTWNSSTDNVGVKGYQIFRNGEMIDTILGTHFIDKKLQPSTEYSYTVKAIDAAGNVSKESTALTVKTTVATPDTEAPTQPKGLHSMGTTASSVDLMWSPSDDNIGVDHYDIYREIEGLMKKIATSNTTSYMDKNLLANTTYKYVVKAVDVAGNESVQSDIFTITTKAESASYEAWDAKKAYKKGDRVLHEGKVYEAVQSYQGNGDPNWIYALSLWKTV

SEQ ID NO: 55 - DNA, 1368 bp, Bacillus cereus
atgaataatcgatttttaaaacaactacaaaatatgaaaatgaacaaaaaaagtttaggagctgtagcattaacagctggaattattagtacgacacttattcctcaaaatgcttatgcgcacggttttgttgaaaagcctggtagccgatctgctttatgtagtccaacttatggtgcgctaaatgtaaactgtggaagtgttatgtatgaaccacaaagtttagaagctccaaaagggttcccacaaggtggtccagtagatggacaaattgcttcagcaggcggaaaatttggtggtattttagatcaacaaacagcaaatcgttggtttaaaaatacaatcactggtggggaaaatacatttacttggaagtatactgcgcctcacttaacgagtaagtggcattactatattactaaaaaaggatggaatccaaataaagcgctaacaagagcagattttgaaccaattggaacagtacaacatgatggttctgcagcttcaaataatttaactcataaaatcaatgtacctactgatcgtagtggatatcatgtgattttagcagtatgggatgtagctgatacagcaaatgcattctataatgtaattgatgttaatcttattaatgatgtgaaaccagacatagaagcgccaagtattccaaatggacttcagacgcaaaaagtaacagcgaatagtgtagaactaacatggaacgcttctacggataatgtaggggtaaaaggatatcaaatcttccgtaacggagagatgattgatacagtactaggcactcattttattgataagaaattacaaccaagtacagaatactcttatactgtaaaagcaattgacgcagctggaaatgtatcgaaagaaagtgcagcgcttacagtaaaaacgacagttgagactcctgatacagaagcaccaacacaaccaaaaggattacatagtatgggaacgacagcgtcaagtgtggatttaatgtggagtccatctgacgataatattggtgtagaccattatgatatttatagagaaacagaaggggcaatgaaaaagattgcaacatccaatacaacttcttatttggataaaaatctgctcgctaatactacttataaatatgtagtgaaagctgttgatgtagctggaaatgaatccgtacagagtgagatattcacaattactacaaaaactgaaaacgcttcatatgaagcgtgggatgcaaaaaaagcatataaaaagggagatagagttctgcacgaaggaaaagtatatgaagcagtccagagttatcaaggaaatggtgatccaaactggatttatgcattatcattatggaaaacagtgtaa

SEQ ID NO: 56 - protein, 455 aa, Bacillus cereus
MNNRFLKQLQNMKMNKKSLGAVALTAGIISTTLIPQNAYAHGFVEKPGSRSALCSPTYGALNVNCGSVMYEPQSLEAPKGFPQGGPVDGQIASAGGKFGGILDQQTANRWFKNTITGGENTFTWKYTAPHLTSKWHYYITKKGWNPNKALTRADFEPIGTVQHDGSAASNNLTHKINVPTDRSGYHVILAVWDVADTANAFYNVIDVNLINDVKPDIEAPSIPNGLQTQKVTANSVELTWNASTDNVGVKGYQIFRNGEMIDTVLGTHFIDKKLQPSTEYSYTVKAIDAAGNVSKESAALTVKTTVETPDTEAPTQPKGLHSMGTTASSVDLMWSPSDDNIGVDHYDIYRETEGAMKKIATSNTTSYLDKNLLANTTYKYVVKAVDVAGNESVQSEIFTITTKTENASYEAWDAKKAYKKGDRVLHEGKVYEAVQSYQGNGDPNWIYALSLWKTV

SEQ ID NO: 57 - DNA, 1368 bp, Bacillus cereus
atgaataatcgatttttaaaacaactacaaaatatgaaaatgaacaaaaaaagtttaggagctgtagcattaacagctggaattattagtacgacacttattcctcaaaatgcttatgcgcacggttttgttgaaaagcctggtagccgatctgctttatgtagtccaacttatggtgcgctaaatgtaaactgtggaagtgttatgtatgaaccacaaagtttagaagctccaaaagggttcccacaaggtggtccagtagatggacaaattgcttcagcaggcggaaaatttggtggtattttagatcaacaaacagcaaatcgttggtttaaaaatacaatcactggtggggaaaatacatttacttggaagtatactgcgcctcacttaacgagtaagtggcattactatattactaaaaaaggatggaatccaaataaagcgctaacaagagcagattttgaaccaattggaacagtacaacatgatggttctgcagcttcaaataatttaactcataaaatcaatgtacctactgatcgtagtggatatcatgtgattttagcagtatgggatgtagctgatacagcaaatgcattctataatgtaattgatgttaatcttattaatgatgtgaaaccagacatagaagcgccaagtattccaaatggacttcaggcgcaaaaagtaacagcgaatagtgtagaactaacatggaacgcttctacggataatgtaggggtaaaaggatatcaaatcttccgtaacggagagatgattgatacagtactaggcactcattttattgataagaaattacaaccaagtacagaatactcttatactgtaaaagcaattgacgcagctggaaatgtatcgaaagaaagtgcagcgcttacagtaaaaacgacagttgagactcctgatacagaagcaccaacacaaccaaaaggattacatagtatgggaacgacagcgtcaagtgtggatttaatgtggagtccatctgacgataatattggtgtagaccattatgatatttatagagaaacagaaggggcaatgaaaaagattgcaacatccaatacaacttcttatttggataaaaatctgctcgctaatactacttataaatatgtagtgaaagctgttgatgtagctggaaatgaatccgtacagagtgatatattcacaattactacaaaaactgaaaacgcttcatatgaagcgtgggatgcaaaaaaagcatataaaaagggagatagagttctgcacgaaggaaaagtatatgaagcagtccagagttatcaaggaaatggtgatccaaactggatttatgcattatcattatggaaaacagtgtaa

SEQ ID NO: 58 - protein, 455 aa, Bacillus cereus
MNNRFLKQLQNMKMNKKSLGAVALTAGIISTTLIPQNAYAHGFVEKPGSRSALCSPTYGALNVNCGSVMYEPQSLEAPKGFPQGGPVDGQIASAGGKFGGILDQQTANRWFKNTITGGENTFTWKYTAPHLTSKWHYYITKKGWNPNKALTRADFEPIGTVQHDGSAASNNLTHKINVPTDRSGYHVILAVWDVADTANAFYNVIDVNLINDVKPDIEAPSIPNGLQAQKVTANSVELTWNASTDNVGVKGYQIFRNGEMIDTVLGTHFIDKKLQPSTEYSYTVKAIDAAGNVSKESAALTVKTTVETPDTEAPTQPKGLHSMGTTASSVDLMWSPSDDNIGVDHYDIYRETEGAMKKIATSNTTSYLDKNLLANTTYKYVVKAVDVAGNESVQSDIFTITTKTENASYEAWDAKKAYKKGDRVLHEGKVYEAVQSYQGNGDPNWIYALSLWKTV

SEQ ID NO: 59 - DNA, 1368 bp, Bacillus cereus
atgaataatcgatttttaaaacaactacaaaatatgaaaatgaacaaaaaaagtttaggaattgtagcattaacagctggaattattagtacgacacttattcctcaaaatgcttatgcgcacggttttgttgaaaagcccggtagccgatccgctttatgtagtccaacttatggtgcgctaaatgtaaactgtggaagtgttatgtatgaaccacaaagtttagaagctccaaaagggttcccacaaggtggtccagtagatggacaaattgcttcagcaggcggaaaatttggtggtattttagatcaacaaacagcaaatcgttggtttaaaaatacaatcactggtggggaaaatacatttacttggaagtatactgcgcctcacttaacgagtaagtggcattactatattactaaaaaaggatggaatccaaataaagcgctaacaagagcagatttcgaaccaattggaactgtacaacatgatggttctgcagcttcaaataatttaactcataaaatcaatgtacctactgatcgtagtggatatcatgtgattttagcagtatgggatgtagctgatacagcaaatgcattctataatgtaattgatgttaatcttattaatgatgtgaaaccagacatagaagcgccaagtattccaaatggacttcagacgcaaaaagtaacagcgaatagtgtagaactaacatggaacgcttctacggataatgtaggggtaaaaggatatcaaatcttccgtaacggagagatgattgatacagtaccagggactcattttattgataagaagttacaaccaagtacagaatactcttatactgtaaaagcaattgacgcagctggcaatgtatcgacagaaagtacagcgcttacagtaaaaacgacagttgagactcctgatacagaagcaccaacacaaccaaaaggattacatagtatgggaacgacagcgtcaagtgtggatttaatgtggagtccatctgacgataatattggtgtagaccattatgatatttatagagaaacagaaggatcaatgaaaaagattgcaacatccaatacaacttcttatttggataaaaatctgctcgctaatactacttataaatatgtagtgaaagctgttgatgtagctggaaatgaatccgtacagagtgatatattcacaattactacaaaaaccgaaagcgcttcatatgaagcgtgggatgcaaaaaaagcatataaaaagggagatagagttctatacgaaggaaaagtatatgaagcagtccagagttatcaaggaaatggtgatccaaactggatttatgcattatcattatggaaaacagtgtaa

SEQ ID NO: 60 - protein, 455 aa, Bacillus cereus
MNNRFLKQLQNMKMNKKSLGIVALTAGIISTTLIPQNAYAHGFVEKPGSRSALCSPTYGALNVNCGSVMYEPQSLEAPKGFPQGGPVDGQIASAGGKFGGILDQQTANRWFKNTITGGENTFTWKYTAPHLTSKWHYYITKKGWNPNKALTRADFEPIGTVQHDGSAASNNLTHKINVPTDRSGYHVILAVWDVADTANAFYNVIDVNLINDVKPDIEAPSIPNGLQTQKVTANSVELTWNASTDNVGVKGYQIFRNGEMIDTVPGTHFIDKKLQPSTEYSYTVKAIDAAGNVSTESTALTVKTTVETPDTEAPTQPKGLHSMGTTASSVDLMWSPSDDNIGVDHYDIYRETEGSMKKIATSNTTSYLDKNLLANTTYKYVVKAVDVAGNESVQSDIFTITTKTESASYEAWDAKKAYKKGDRVLYEGKVYEAVQSYQGNGDPNWIYALSLWKTV

SEQ ID NO: 61 - DNA, 1368 bp, Bacillus cereus
atgaataatcgatttttaaaacaactacaaaatatgaaaatgaacaaaaaaagtttaggaattgtagcattaacagctggaattattagtacgacacttattcctcaaaatgcttatgcgcacggttttgttgaaaagcccggtagccgatccgctttatgtagtccaacttatggtgcgctaaatgtaaactgtggaagtgttatgtatgaaccacaaagtttagaagctccaaaagggttcccacaaggtggtccagtagatggacaaattgcttcagcaggcggaaaatttggtggtattttagatcaacaaacagcaaatcgttggtttaaaaatacaatcactggtggggaaaatacatttacttggaagtatactgcgcctcacttaacgagtaagtggcattactatattactaaaaaaggatggaatccaaataaagcgctaacaagagcagatttcgaaccaattggaactgtacaacatgatggttctgcagcttcaaataatttaactcataaaatcaatgtacctactgatcgtagtggatatcatgtgattttagcagtatgggatgtagctgatacagcaaatgcattctataatgtaattgatgttaatcttattaatgatgtgaaaccagacatagaagcaccaagtattccaaatggacttcagacgcaaaaagtaacagcgaatagtgtagaactaacatggaacgcttctacggataatgtaggggtaaaaggatatcaaatcttccgtaacggagagatgattgatacagtaccagggactcattttattgataagaagttacaaccaagtacagaatactcttatactgtaaaagcaattgacgcagctggcaatgtatcgacagaaagtacagcgcttacagtaaaaacgacagctgagactcctgatacagaagcaccaacacaaccaaaaggattacatagtatgggaacgacagcgtcaagtgtggatttaatgtggagtccatctgacgataatattggtgtagaccattatgatatttatagagaaacagaagggtcaatgaaaaagattgcaacatccaatacaacttcttatttggataaaaatctgctcgctaatactacttataaatatgtagtgaaagctgttgatgtagctggaaatgaatccgtacagagtgatatattcacaattactacaaaaactgaaagcgcttcacatgaagcgtgggatgcaaaaaaagcatataaaaagggagatagagttctacacgaaggaaaagtatatgaagcagtccagagttatcaaggaaatggtgatccaaactggatttatgcattatcattatggaaaacagtgtaa

SEQ ID NO: 62 - protein, 455 aa, Bacillus cereus
MNNRFLKQLQNMKMNKKSLGIVALTAGIISTTLIPQNAYAHGFVEKPGSRSALCSPTYGALNVNCGSVMYEPQSLEAPKGFPQGGPVDGQIASAGGKFGGILDQQTANRWFKNTITGGENTFTWKYTAPHLTSKWHYYITKKGWNPNKALTRADFEPIGTVQHDGSAASNNLTHKINVPTDRSGYHVILAVWDVADTANAFYNVIDVNLINDVKPDIEAPSIPNGLQTQKVTANSVELTWNASTDNVGVKGYQIFRNGEMIDTVPGTHFIDKKLQPSTEYSYTVKAIDAAGNVSTESTALTVKTTAETPDTEAPTQPKGLHSMGTTASSVDLMWSPSDDNIGVDHYDIYRETEGSMKKIATSNTTSYLDKNLLANTTYKYVVKAVDVAGNESVQSDIFTITTKTESASHEAWDAKKAYKKGDRVLHEGKVYEAVQSYQGNGDPNWIYALSLWKTV

SEQ ID NO: 63 - DNA, 1257 bp, Bacillus thuringiensis
atgaataatcgatttttaaaacaactacaaaacatgaaaatgaacaaaaaaagtttaggagctgtagcattaacagctggaattattagtacgacacttattcctcaaaatgcttatgcgcacggttttgttgaaaagcccggtagccgatccgctttatgtagtccaacttatggtgcgctaaatgtaaactgcggaagtgttatgtatgaaccacaaagtttagaagctccaaaagggttcccacaaggtggtccagtagatggacaaattgcttcagcaggcggaaaatttggtggtattttagatcaacaaacagcaaatcgttggtttaaaaatacaatcactggtggggaaaatacatttacttggaagtatactgcgcctcacttaacgagtaagtggcattactatattactaaaaaaggatggaatccaaataaagcgctaacaagagcagattttgaaccaattggaactgtgcaacacgatggttctgcagcttcaaataatttaactcataaaattaatgtacctactgatcgtagtggatatcatgtgattttagcagtatgggatgtagctgatacagcaaatgcattctataatgtaattgatgttaatcttattaatgatgtgaaaccagacatagaagcgccaagtattccaaatggacttcagacgaaaaaagtaacagcgaatagtgtagaactaacatggaactcttctacggataatgtaggggtaaaaggatatcaaatcttccgtaacggagagatgatcgatacaatactaggcactcattttattgataagaaattacaaccaagcacagaatactcttatactgtaaaagcaattgacgcagctggaaatgtatcgaaagaaagtacagcgcttacagtaaaaacaacagttgcgactcctgatacagaagtaccaacacaaccaaaaggattacatagtatgggaacgacagcatcaagtgtggatttaatgtggagtccatctgacgataacattggtgtagaccattatgatatttatagagaaatagaaggattaatgaaaaagattgcaacatccaatacaacttcttatatggataaaaatctgcttgctaatactacttataaatatgtagtgaaagctgttgatgtagctggaaatgaatccgtacagagtgatatattcacaattactacaaaagatgaaagcgcttcatatgaagcgtgggatgcaaaaaaaagcatataa

SEQ ID NO: 64 - protein, 418 aa, Bacillus thuringiensis
MNNRFLKQLQNMKMNKKSLGAVALTAGIISTTLIPQNAYAHGFVEKPGSRSALCSPTYGALNVNCGSVMYEPQSLEAPKGFPQGGPVDGQIASAGGKFGGILDQQTANRWFKNTITGGENTFTWKYTAPHLTSKWHYYITKKGWNPNKALTRADFEPIGTVQHDGSAASNNLTHKINVPTDRSGYHVILAVWDVADTANAFYNVIDVNLINDVKPDIEAPSIPNGLQTKKVTANSVELTWNSSTDNVGVKGYQIFRNGEMIDTILGTHFIDKKLQPSTEYSYTVKAIDAAGNVSKESTALTVKTTVATPDTEVPTQPKGLHSMGTTASSVDLMWSPSDDNIGVDHYDIYREIEGLMKKIATSNTTSYMDKNLLANTTYKYVVKAVDVAGNESVQSDIFTITTKDESASYEAWDAKKSI

SEQ ID NO: 65 - DNA, 1392 bp, Bacillus thuringiensis
ttgggggggacaaaaatgaaattgaaattaacatctaaattggaaagattaaaaacaagtaaaaaggggattggtgcttgtgtattggctgcaggcatgatggcaatcacaatgactcctcaaagtgcgtatgcacatgggtttgttgaaaagccgagtagtcgtgctgctttatgtagtcagaattatggggcattaaatttaaattgtggaaatgtaatgtacgaacctcaaagtctagaagcacctaaaggatttccagatagtggaccgattgatgggaaaatcgcttcggcaggaggattgtttggaggtgttcttgaccaacaaacatcaaatcgttggttcaaaaacacaattaaaggtggagtaaatacatttacatggaaatatacagcgccacattctacaagtaaatggcattattacattacaaaaaagggatgggatcctaacaaaccattaacacgtgctgaattagaaccaatcggaactgtgaaacatgacggttcggccgcatcaaataatttaacacatacaattaatgtaccaactgatcgtaatggttatcatgttattttagctgtatgggatgtagcagatacgtcaaatgctttttataatgtagttgatgtaaatttagtaaataatgaaaatcctgatacagtagctccaagtcaaccaactgaattaaatgcctctaaagtttctgccaatagtgttgaaataacatggaaggcttccactgataatataggtgtaaaagaatatcaagtgttacgtaatggagaagtaattgatacggtaccaggtacaacttttattgataaaaaattaaaagcagatacggaatatacttatacaataaaggcattagactctgctggaaacatatcaaaagaaagtgaaaaactgaaggttaagacaacacatacaatcccagatatagaggctccaactcaaccaaaaggattacatagtatgggtacaacatcgacaactgttgatttgatgtggagtccgtcagaagataatgtaggtgttgaccattatattgtatatagagaaagcgctggggttatgaataaaattgggacagcggctaatacatcctttatggataaagatttgaaggctaatacatcgtataaatatgtagtgacggcggttgatttagctggaaatgaatctagtagaagtgatgttttgaatgtaacaacaaagtcagaggattccgcatatgaaaaatgggatgcaagaaaagcatatactaaaggtgatagagtagtacatgaggggaaagtgtacgaagcggttcaaaatcatcaaggaaatggcgactcaaattggatttttgctttatcgctttggaagccagttttgaataaatga

SEQ ID NO: 66 - protein, 463 aa, Bacillus thuringiensis
MGGTKMKLKLTSKLERLKTSKKGIGACVLAAGMMAITMTPQSAYAHGFVEKPSSRAALCSQNYGALNLNCGNVMYEPQSLEAPKGFPDSGPIDGKIASAGGLFGGVLDQQTSNRWFKNTIKGGVNTFTWKYTAPHSTSKWHYYITKKGWDPNKPLTRAELEPIGTVKHDGSAASNNLTHTINVPTDRNGYHVILAVWDVADTSNAFYNVVDVNLVNNENPDTVAPSQPTELNASKVSANSVEITWKASTDNIGVKEYQVLRNGEVIDTVPGTTFIDKKLKADTEYTYTIKALDSAGNISKESEKLKVKTTHTIPDIEAPTQPKGLHSMGTTSTTVDLMWSPSEDNVGVDHYIVYRESAGVMNKIGTAANTSFMDKDLKANTSYKYVVTAVDLAGNESSRSDVLNVTTKSEDSAYEKWDARKAYTKGDRVVHEGKVYEAVQNHQGNGDSNWIFALSLWKPVLNK

SEQ ID NO: 67 - DNA, 1353 bp, Bacillus thuringiensis
ttggaaagattaagaacaagtaaaaaggggattggtgcttgtgttttggctgcaggcatgacggcaatcacaatgactcctcaaagtgcgtatgcacatgggtttgttgaaaagccgagtagtcgtgctgctttatgtagtcagaattatggggcattaaatttaaattgtggaaatgtaatgtatgaacctcaaagtctagaagcacctaaaggatttccagatagtggaccgattgatggggaaattgcttcggcaggaggattgtttggaggtattcttgaccaacaaacatcaaatcgttggttcaaaaacacaattaaaggtggagtaaatacatttacatggaaatatacagcgccacattctacaagtaaatggcattattacattaccaaaaaaggatgggatcctaacaaaccattaacacgtgctgaattagaaccaatcggaactgtgaaacatgacggttcggccgcatcaaataatttaacacatacaattaatgtaccaactgatcgtaatggttatcatgttattttagctgtatgggatgtagcagatacgtcaaacgctttttataatgtagttgatgtaaatttagtaaataatgaaactcctgatacagtagctccaagtcaaccaactgaattaaatgcctctaaagtttctgccaatagtgttgaaataacatggaaggcctccactgataatataggtgtaaaagaatatcaagtgttacgtaatggagaagtaattgatacggtatcaggtacaacttttattgataaaaaattaaaagcagatacggaatatacttatacaataaaggcattagactctgctggaaacatatcaaaagaaagtgaaaaactgaaggttaagacaacacatacaatcccagatatagaggctccaactcagccaaaaggattacatagtatgggtacaacagcgacaactgttaatttaatgtggagtccgtcagaagataatgtaggtgttgaccattatattgtatatagagaaagcgctggggttatgaataaaattgggacggcggctaatacatcttttatggataaagatttgaaggctaatacatcgtataaatatgtagtgacggcggttgatttagctggaaatgaatctagtagaagtgatgttttgaatgtaacaacaaagttagaggatcccgcatatgaaaaatgggatgcaagaaaagcatatactaaaggtgatagagtagtacatgaggggaaagtgtacgaagcggttcaaaatcatcaagggaatggcgactcaaattggatttttgctttatcgctttggaagccagttttgaataagtga

SEQ ID NO: 68 - protein, 450 aa, Bacillus thuringiensis
MERLRTSKKGIGACVLAAGMTAITMTPQSAYAHGFVEKPSSRAALCSQNYGALNLNCGNVMYEPQSLEAPKGFPDSGPIDGEIASAGGLFGGILDQQTSNRWFKNTIKGGVNTFTWKYTAPHSTSKWHYYITKKGWDPNKPLTRAELEPIGTVKHDGSAASNNLTHTINVPTDRNGYHVILAVWDVADTSNAFYNVVDVNLVNNETPDTVAPSQPTELNASKVSANSVEITWKASTDNIGVKEYQVLRNGEVIDTVSGTTFIDKKLKADTEYTYTIKALDSAGNISKESEKLKVKTTHTIPDIEAPTQPKGLHSMGTTATTVNLMWSPSEDNVGVDHYIVYRESAGVMNKIGTAANTSFMDKDLKANTSYKYVVTAVDLAGNESSRSDVLNVTTKLEDPAYEKWDARKAYTKGDRVVHEGKVYEAVQNHQGNGDSNWIFALSLWKPVLNK

SEQ ID NO: 69 - DNA, 1377 bp, Bacillus cereus
atgaatttgaaattaacatctaagttagaaagattaagaaaaagtaaaaaaggaattggtgcttgtgttttagctgcaggagtgacggcaattacaatgattcctcaaagtgcatatgcacatgggtttgttgaaaagccaagtagtcgtgctgctttatgtagtcagaattatggagcattaaatttaaattgtggtaatgtaatgtatgaacctcaaagcctagaagcatctaaaggattcccagaaggtggcccgattgatggggaaatcgcttcggcaggaggattgtttggaggaattcttgaccaacaaacatcaaatcgctggttcaaaaacacaattaaggggggagaaaatacatttacatggaaatacacagcggcacattctacaagtaaatggcattattacattaccaaaaagggatgggatcctaataaaccattaacacgtgctgaattagaaccaattggaactgtgaaacatgacggttcggcagcatcaaataatttaacacatataattaatgtaccaactgatcgcaatggttatcatgttattttagctgtatgggatatagcggatacatcaaatgcgttttataacgtaattgatgtaaatctagtaaataatgaaattcctgatacagtagcaccgagtcagccaataggattaaatgcatctaaagtcactgccaatggtatcgaactaacatggaaggcttcaactgataatgtaggcgtaaaagaatatcaagtgttacgtaatggagaagtgattaatacggtaccaggtacaacttttactgataaaaaactaaaagcaaatacggaatatacctatacaataaaggcattagacgctgctggaaacatatcaaaagaaagtgaaaaactaaaggctaagacaacaaatgaaattccagataaagaggctccgactcaaccaaaaggattacatagtatgggtacaacagcgacaactgttgatttgatgtggagtccgtctgaagataatgtaggtgttgaccattatattgtatatagagaaagcgctggggttatgaataaaattggggcagctgataatacatcctttatggataaagatttgaaggctaatacatcgtataagtatgtagtgacggcggttgacttagctggaaatgaatctagtagaagtaatgttttagctgtaacaacaaagctagaggactctacttatgaaaaatgggatgcaagaaaagcatacaataaaggtgataaagtagtacatgagggaaaagtgtatgaagcggttcaaagttatcaagggaacggcgatccaaattggatttttgcactatcgctttggaagccagttttaaataaatga

SEQ ID NO: 70 - protein, 458 aa, Bacillus cereus
MNLKLTSKLERLRKSKKGIGACVLAAGVTAITMIPQSAYAHGFVEKPSSRAALCSQNYGALNLNCGNVMYEPQSLEASKGFPEGGPIDGEIASAGGLFGGILDQQTSNRWFKNTIKGGENTFTWKYTAAHSTSKWHYYITKKGWDPNKPLTRAELEPIGTVKHDGSAASNNLTHIINVPTDRNGYHVILAVWDIADTSNAFYNVIDVNLVNNEIPDTVAPSQPIGLNASKVTANGIELTWKASTDNVGVKEYQVLRNGEVINTVPGTTFTDKKLKANTEYTYTIKALDAAGNISKESEKLKAKTTNEIPDKEAPTQPKGLHSMGTTATTVDLMWSPSEDNVGVDHYIVYRESAGVMNKIGAADNTSFMDKDLKANTSYKYVVTAVDLAGNESSRSNVLAVTTKLEDSTYEKWDARKAYNKGDKVVHEGKVYEAVQSYQGNGDPNWIFALSLWKPVLNK

SEQ ID NO: 71 - DNA, 1368 bp, Bacillus mycoides
atgaataatcgatttttaaaacaactacaaaacttgaaaatgaacaaaaaaagtataggagctgttgcattaacagctggaattatcagcacgacacttattcctcaaaatgcatacgcgcacggctttgttgaaaagcctggtagccgttccgctttatgtagtccaacttatggtgctctaaatgtaaactgcggaagtgttatgtatgaaccacaaagtttagaagctccaaaaggattcccacaaggtggcccagttgatgggcaaatcgcttctgcaggtggaaaatttggcggtattttagatcaacaaacagcaaatcgttggtttaaaaatacaatcactggtggggaaaatacatttacttggaagtatacagcacctcacttaacaagcaaatggcactactatattacaaaaaaaggatggaatccaaataaagcactaacaagagcagactttgagccaattggcactgtacaacatgatggttctgcagcttcaaataatttaactcataaaatcaatgtacctactgaccgtagtggatatcatgtgattttcgctgtatgggatgtagctgatacagcaaatgcgttctataatgtaattgatgtgaatctcatcaataatgtgaaaccagacacagaagcgccaagtattccaaatggaattcaggcgcaaaaagtaacagcgaatagtatagaactaacatggaacgtttctacggataatgtaggagtaaaagggtaccaaatcttccgtaacggagagatgattgacacagtaccaggcacttattttattgataagaaattacaaccaagcacagaatatacttatactgtaaaagcaattgacgcagctggcaatgtatcgaaagaaagtacagcgcttacagtgaaaacaacagttgaagctcttgatacagaagcaccaacacaaccaaaaggattacatagcatgggaacaacagcgtcaagtgtggatctaatgtggagcccatctgatgataacgttggagtagactattacgatatttatagagaaatagaaggaacaatgaaaaaaattgcaacatccaatacgacttcttatatggataaaaatttactcgctaatactacttataaatatgcagtgaaagcagtggatgtagttggaaatgaatccgtacaaagtgatacgttcacaattactacaaaaactgaaagcgcttcatatgaagcgtgggatgcaaagaaagcatataaaaaggaagatagagttttacacgagggaaaagtgtatgaagcagtccagaattatgaaggacatggggatccaaactggatttttgctttatccttatggaaaacagtgtaa

SEQ ID NO: 72 - protein, 455 aa, Bacillus mycoides
MNNRFLKQLQNLKMNKKSIGAVALTAGIISTTLIPQNAYAHGFVEKPGSRSALCSPTYGALNVNCGSVMYEPQSLEAPKGFPQGGPVDGQIASAGGKFGGILDQQTANRWFKNTITGGENTFTWKYTAPHLTSKWHYYITKKGWNPNKALTRADFEPIGTVQHDGSAASNNLTHKINVPTDRSGYHVIFAVWDVADTANAFYNVIDVNLINNVKPDTEAPSIPNGIQAQKVTANSIELTWNVSTDNVGVKGYQIFRNGEMIDTVPGTYFIDKKLQPSTEYTYTVKAIDAAGNVSKESTALTVKTTVEALDTEAPTQPKGLHSMGTTASSVDLMWSPSDDNVGVDYYDIYREIEGTMKKIATSNTTSYMDKNLLANTTYKYAVKAVDVVGNESVQSDTFTITTKTESASYEAWDAKKAYKKEDRVLHEGKVYEAVQNYEGHGDPNWIFALSLWKTV

SEQ ID NO: 73 - DNA, 1368 bp, Bacillus cereus
atgaataatcgattattaaaacaactacaaaacatgaaaatgaacaaaaaaagtctaggagctgttgcattaacagctggaattattagtacgacacttattcctcaaaatgcttatgcgcacggttttgttgaaaagcctggtagccgatctgctttatgtagttcaacttatggtgcgctaaatgtaaactgtggaagtgttatgtatgaaccacaaagtttagaagctccaaaagggttcccacaaggtggtccagtagatggacaaattgcttcagcaggcggaaaatttggtggtattttagatcaacaaacagccgatcgttggtttaaaaatacaattacaggcggggaaaatacatttacgtggaaatatacagcgcctcacttaacgagcaaatggcattactatattacaaaaaaaggatgggatccaaataaagcgctcacaagagcagattttgaaccaattggaactgtgcaacatgatggttctgcagcttcaaatcaattaactcacaaaatcaatgtacctactgatagaagtggatatcatgtaattttagcggtatgggatgtagctgatactgcaaatgcattctataatgtaattgatgtcaatctcatcaatgatgtgaaaccagatacagaagctccaagtattccaaatggaattcaggcacaaaaaataacagcgaatagtatagaactagcttggaacgcttctacggataatataggggtaaaaggatatcaaattttccgtaacggagagatggttgatacagtaacaggacctcattttattgataaaaaattacaaccaagtacagaatattcttatacagtaaaagcaattgacgtagctggaaatgtctcgaaagaaagtgcaacgctcaaaataaaaacaacagttgaggcacctgatacagaagcaccaacacaaccaaaaggattacatagtatgggaacaacagcgtcaagtgtggatctaatgtggagtccttctgacgataatattggtgtagaccattacgatatttatagagaaatagaaggatcgatgaaaaagattgcaacatccaatacgacttcttatatggataaatatttactctctaatactacttataaatatgtagtgaaagctattgatgtagctggaaatgaatctatacagagtgatatattcacaattactacaaaaactgaaagcgctacatatgaagagtgggatgcaaagaaagcatatgaaaagggagatagagttctacacgagggaaaagtatatgaagcagtccaaagttataaaggaaatggggatccaaactggatttatgccttatcattatggaaaacagtgtaa

SEQ ID NO: 74 - protein, 455 aa, Bacillus cereus
MNNRLLKQLQNMKMNKKSLGAVALTAGIISTTLIPQNAYAHGFVEKPGSRSALCSSTYGALNVNCGSVMYEPQSLEAPKGFPQGGPVDGQIASAGGKFGGILDQQTADRWFKNTITGGENTFTWKYTAPHLTSKWHYYITKKGWDPNKALTRADFEPIGTVQHDGSAASNQLTHKINVPTDRSGYHVILAVWDVADTANAFYNVIDVNLINDVKPDTEAPSIPNGIQAQKITANSIELAWNASTDNIGVKGYQIFRNGEMVDTVTGPHFIDKKLQPSTEYSYTVKAIDVAGNVSKESATLKIKTTVEAPDTEAPTQPKGLHSMGTTASSVDLMWSPSDDNIGVDHYDIYREIEGSMKKIATSNTTSYMDKYLLSNTTYKYVVKAIDVAGNESIQSDIFTITTKTESATYEEWDAKKAYEKGDRVLHEGKVYEAVQSYKGNGDPNWIYALSLWKTV

SEQ ID NO: 75 - DNA, 1368 bp, Bacillus thuringiensis
atgaataatcgattattaaaacaactacaaaacatgaaaatgaacaaaaaaagtctaggagctgttgcgttaacagctggaattattggcacaacacttattcctcaaaacgcatacgcgcacggttttgttgaaaaacctggcagccgatctgctttatgtagtccaacctatggtgcactaaatgtaaattgcggaagtgttatgtatgaaccgcaaagtttagaagctccaaaaggcttcccgcaaggtggcccagttgatggacaaatcgcttctgcaggtggtaaatttggtggtgtgttagatcaacaaacagcaaatcgttggtttaaaaatacaatcactggtggagaaaatacatttacttggaagtatacagcgcctcatttaacgagcaaatggcattactatattacaaaaaaaggatggaatccaaataaagcgctcacaagagcagattttgaaccgattggaactgtacaacatgatggttctgcagcctcaaatcatttaactcacaaaatcaatgtacctactgatcgtagtggatatcatgtgattttagcagtatgggatgtagccgatacagcaaatgcattctataatgttattgatgttaatctcatcaatgacgtaaaaccagatacagaggctccaagtattccaaatggaattcaggcccaaaaagtaacagcgcatagtgttgaactagcatggaccgcttctacggataatgtaggggtaaaaggatatcaaatcttccgtaatggagagatgatcgacacagtaccgggcactcattttattgataaaaaattaaaaccaagtacagaatactcttatactataaaagcaattgacgcagctggaaatgtatcgaaagaaagtgcaacgcttacagtgaaaacaacagttgaggctcctgatacagaagcaccaacacaaccaaaaggattacatagtatgggaacgacagcgtcaagtgtggatctaatgtggagtccttctgatgataatattggtgtagaccattacgatatttatagagaaacaaaaggatcaatggaaaaaattgcaacatccaatacgacttcttatatggataaatatttactctctaatactacttataaatatgtagtgaaagctgttgatgtagctggaaatgaatctgtacagagtgatatattcataattactacaaaaactgaaagcgtttcatatgaagaatgggatgcaaagaaagcatatgaaaagggagataaagttctacacgagggaaaagtatatgaagcagtccaaagttataaaggaaatggggatccaaactggatttatgctttatcattatggaaaacagtgtaa

SEQ ID NO: 76 - protein, 455 aa, Bacillus thuringiensis
MNNRLLKQLQNMKMNKKSLGAVALTAGIIGTTLIPQNAYAHGFVEKPGSRSALCSPTYGALNVNCGSVMYEPQSLEAPKGFPQGGPVDGQIASAGGKFGGVLDQQTANRWFKNTITGGENTFTWKYTAPHLTSKWHYYITKKGWNPNKALTRADFEPIGTVQHDGSAASNHLTHKINVPTDRSGYHVILAVWDVADTANAFYNVIDVNLINDVKPDTEAPSIPNGIQAQKVTAHSVELAWTASTDNVGVKGYQIFRNGEMIDTVPGTHFIDKKLKPSTEYSYTIKAIDAAGNVSKESATLTVKTTVEAPDTEAPTQPKGLHSMGTTASSVDLMWSPSDDNIGVDHYDIYRETKGSMEKIATSNTTSYMDKYLLSNTTYKYVVKAVDVAGNESVQSDIFIITTKTESVSYEEWDAKKAYEKGDKVLHEGKVYEAVQSYKGNGDPNWIYALSLWKTV

SEQ ID NO: 77 - DNA, 1368 bp, Bacillus thuringiensis
atgaataatcgatttttaaaacaactacaaaatatgaaaatgaacaaaaaaagtttaggagctgtagcattaacagctggaattattagtacgacacttattcctcaaaatgcttatgcgcacggttttgttgaaaagcctggtagccgatctgctttatgtagtccaacttatggtgcgctaaatgtaaactgtggaagtgttatgtatgaaccacaaagtttagaagctccaaaagggttcccacaaggtggtccagtagatggacaaattgcttcagcaggcggaaaatttggtagtattttagatcaacaaacagcaaatcgttggtttaaaaatacaatcactggtggggaaaatacatttacttggaagtatactgcgcctcacttaacgagtaagtggcattactatattactaaaaaaggatggaatccaaataaagcgctaacaagagcagattttgaaccaattggaacagtacaacatgatggttctgcagcttcaaataatttaactcataaaatcaatgtacctactgatcgtagtggatatcatgtgattttagcagtatgggatgtagctgatacagcaaatgcattctataatgtaattgatgttaatcttattaatgatgtgaaaccagacatagaagcgccaagtattccaaatggacttcagacgcaaaaagtaacagcaaatagtgtagaactaacatggaacgcttctacggataatgtaggggtaaaaggatatcaaatcttccgtaacggagagatgattgatacagtaataggcactcattttattgataagaaattacaaccaagcacagaatactcttatactgtaaaagcaattgacgcagctggcaatgtatcgaaggaaagtacagcgcttacagtaaaaacaacagttgagattccagatacagaagcaccaacacaaccaaaaggattacatagtatgggaacgacagcgtcaagtgtggatttaatgtggagtccatctgacgataatattggtgtagaccattacgatatttatagagaaacagaaggatcaatgaaaaagattgcaacatccaatacaacttcttatatggataaaaatctgctcgctaatactacttataaatatgtagtaaaagctgttgatgtagctggaaatgaatccgtacagagtgatatattcacaattactacaaaaaccgaaagcgcttcatatgaagcgtgggatgcaaaaaaagcatataaaaagggagatagagttctacacgaaggaaaagtatatgaagcagtccagagtcatcaaggaaatggtgatccgaactggatttatgcattatcattatggaaaacagtgtaa

SEQ ID NO: 78 - protein, 455 aa, Bacillus thuringiensis
MNNRFLKQLQNMKMNKKSLGAVALTAGIISTTLIPQNAYAHGFVEKPGSRSALCSPTYGALNVNCGSVMYEPQSLEAPKGFPQGGPVDGQIASAGGKFGSILDQQTANRWFKNTITGGENTFTWKYTAPHLTSKWHYYITKKGWNPNKALTRADFEPIGTVQHDGSAASNNLTHKINVPTDRSGYHVILAVWDVADTANAFYNVIDVNLINDVKPDIEAPSIPNGLQTQKVTANSVELTWNASTDNVGVKGYQIFRNGEMIDTVIGTHFIDKKLQPSTEYSYTVKAIDAAGNVSKESTALTVKTTVEIPDTEAPTQPKGLHSMGTTASSVDLMWSPSDDNIGVDHYDIYRETEGSMKKIATSNTTSYMDKNLLANTTYKYVVKAVDVAGNESVQSDIFTITTKTESASYEAWDAKKAYKKGDRVLHEGKVYEAVQSHQGNGDPNWIYALSLWKTV

SEQ ID NO: 79 - DNA, 1368 bp, Bacillus cereus
atgaataatcgatttttaaaacaactacaaaatatgaaaatgaacaaaaaaagtttaggagctgtagcattaacagctggaattattagtacgacacttattcctcaaaatgcttatgcgcacggttttgttgaaaagcctggtagccgatctgctttatgtagtccaacttatggtgcgctaaatgtaaactgtggaagtgttatgtatgaaccacaaagtttagaagctccaaaagggttcccacaaggtggtccagtagatggacaaattgcttcagcaggcggaaaatttggtagtattttagatcaacaaacagcaaatcgttggtttaaaaatacaatcactggtggggaaaatacatttacttggaagtatactgcgcctcacttaacgagtaagtggcattactatattactaaaaaaggatggaatccaaataaagcgctaacaagagcagattttgaaccaattggaacagtacaacatgatggttctgcagcttcaaataatttaactcataaaatcaatgtacctactgatcgtagtggatatcatgtgattttagcagtatgggatgtagctgatacagcaaatgcattctataatgtaattgatgttaatcttattaatgatgtgaaaccagacatagaagcgccaagtattccaaatggacttcagacgcaaaaagtaacagcgaatagtgtagaactaacatggaacgcttctacggataatgtaggggtaaaaggatatcaaatcttccgtaacggagagatgattgatacagtactaggcactcattttattgataagaaattacaaccaagtacagaatactcttatactgtaaaagcaattgacgcagctggaaatgtatcgaaagaaagtgcagcgcttacagtaaaaacgacagttgagactcctgatacagaagcaccaacacaaccaaaaggattacatagtatgggaacgacagcgtcaagtgtggatttaatgtggagtccatctgacgataatattggtgtagaccattatgatatttatagagaaacagaaggggcaatgaaaaagattgcaacatccaatacaacttcttatttggataaaaatctgctcgctaatactacttataaatatgtagtgaaagctgttgatgtagctggaaatgaatccgtacagagtgatatattcacaattactacaaaaactgaaaacgcttcatatgaagcgtgggatgcaaaaaaagcatataaaaagggagatagagttctgcacgaaggaaaagtatatgaagcagtccagagttatcaaggaaatggtgatccaaactggatttatgcattatcattatggaaaacagtgtaa

SEQ ID NO: 80 - protein, 455 aa, Bacillus cereus
MNNRFLKQLQNMKMNKKSLGAVALTAGIISTTLIPQNAYAHGFVEKPGSRSALCSPTYGALNVNCGSVMYEPQSLEAPKGFPQGGPVDGQIASAGGKFGSILDQQTANRWFKNTITGGENTFTWKYTAPHLTSKWHYYITKKGWNPNKALTRADFEPIGTVQHDGSAASNNLTHKINVPTDRSGYHVILAVWDVADTANAFYNVIDVNLINDVKPDIEAPSIPNGLQTQKVTANSVELTWNASTDNVGVKGYQIFRNGEMIDTVLGTHFIDKKLQPSTEYSYTVKAIDAAGNVSKESAALTVKTTVETPDTEAPTQPKGLHSMGTTASSVDLMWSPSDDNIGVDHYDIYRETEGAMKKIATSNTTSYLDKNLLANTTYKYVVKAVDVAGNESVQSDIFTITTKTENASYEAWDAKKAYKKGDRVLHEGKVYEAVQSYQGNGDPNWIYALSLWKTV

SEQ ID NO: 81 - DNA, 1368 bp, Bacillus cereus
atgaataatcgattattaaaacaactacaaaacatgaaaatgaacaaaaaaagtctaggagctgttgcattaacagctggaattattggtacgacgcttattcctcaaaacacatatgcgcatggttttgttgaaaaacctggcagtcgatctgctttatgtagtccaacttatggtgcactaaatgtaaattgcggaagtgttatgtatgaaccgcaaagcttagaagcaccaaaaggattcccgcaaggtggcccagttgatggacaaatcgcttctgcaggtggtaagtttggtggtattttagatcaacaaacagccgatcgttggtttaaaaatacaattacaggcggggaaaatacatttacgtggaaatatacagcgcctcacttaacgagcaaatggcattactatattacaaaaaaaggatgggatccaaataaagcgctcacaagagcagattttgaaccaattggaactgtgcaacatgatggttctgcagcctcaaatcatttaactcacaaaatcaatgtacctactgatagaagtggatatcatgtaattttagcagtatgggatgtagctgatactgcaaatgcattctataatgtaattgatgttaatctcatcaatgacgtaaaaccagacacagaagctccaagcattccaaatagaattcaggcacaaaaagtaacagcgaatagtatagaactagcatggaacgcttctacggataatgtaggggtaaaagggtatcaaatcttccgtaacggagagatgattgatacagtaacaggacctcattttattgataaaaaattacaaccaagtacagaatactcttatactgtaaaagcaattgacgcagctggaaatgtatcgaaagaaagtgcaacgcttacagtgaaaacaacagttgaggctcctgatacagaagcaccaacacaaccaaaaggattacatagtatgggaacaacagcgtcaagtgtggatctaatgtggagtccttctgacgataatattggtgtagaccattacgatatttatagagaaatagaaggatcgatgaaaaagattgtaacatccaatacgacttcttatatggataaaaatttactccctaatactacttataaatatgtagtgaaagctgttgatgtagctggaaatgaatctgtacagagtgatatattcataattactacaaaaactgaaagcgcttcatatgaagagtgggatgcaaagaaagcatatgaaaagggagatagagttctacacgagggaaaagtatatgaagcagtccaaagttataaaggaaatggggatccaaactggatttatgccttatcattatggaaaacagtgtaa

SEQ ID NO: 82 - protein, 455 aa, Bacillus cereus
MNNRLLKQLQNMKMNKKSLGAVALTAGIIGTTLIPQNTYAHGFVEKPGSRSALCSPTYGALNVNCGSVMYEPQSLEAPKGFPQGGPVDGQIASAGGKFGGILDQQTADRWFKNTITGGENTFTWKYTAPHLTSKWHYYITKKGWDPNKALTRADFEPIGTVQHDGSAASNHLTHKINVPTDRSGYHVILAVWDVADTANAFYNVIDVNLINDVKPDTEAPSIPNRIQAQKVTANSIELAWNASTDNVGVKGYQIFRNGEMIDTVTGPHFIDKKLQPSTEYSYTVKAIDAAGNVSKESATLTVKTTVEAPDTEAPTQPKGLHSMGTTASSVDLMWSPSDDNIGVDHYDIYREIEGSMKKIVTSNTTSYMDKNLLPNTTYKYVVKAVDVAGNESVQSDIFIITTKTESASYEEWDAKKAYEKGDRVLHEGKVYEAVQSYKGNGDPNWIYALSLWKTV

SEQ ID NO: 83 - DNA, 1368 bp, Bacillus cereus
atgaataatcgattattaaaacaactacaaaacatgaaaatgaacaaaaaaagtctaggagctgttgcattaacagctggaattattggtacgacgcttattcctcaaaacacatatgcgcatggttttgttgaaaaacctggcagtcgatctgctttatgtagtccaacttatggtgcactaaatgtaaattgcggaagtgttatgtatgaaccgcaaagcttagaagcaccaaaaggattcccgcaaggtggcccagttgatggacaaatcgcttctgcaggtggtaagtttggtggtattttagatcaacaaacagcaaatcgttggtttaaaaatacaattacaggcggggaaaatacatttacgtggaaatatacagcgcctcacttaacgagcaaatggcattactatattacaaaaaaaggatggaatccaaataaagcgctcacaagagcagattttgaaccaattggaactgtgcaacatgatggttctgcagcctcaaatcatttaactcacaaaatcaatgtacctactgatagaagtggatatcatgtaattttagcagtatgggatgtagctgatactgcaaatgcattctataatgtaattgatgttaatctcatcaatgacgtaaaaccagacacagaagctccaagcattccaaatagaattcaggcacaaaaagtaacagcgaatagtatagaactagcatggaacacttctacggataatgtaggggtaaaagggtatcaaatcttccgtaacggagagatgattgatacagtaccaggaactcattttattgataaaaaattacaaccaagtacagaatactcttatactgtaaaagcaattgacgcagctggaaatgtatcgaaagaaagtgcaacgcttacagtgaaaacaacagttgaggctcctgatacagaagcaccaacacaaccaataggattacatagtatgggaacgacagcgtcaagtgtggatctaatgtggagtccttctgacgataatattggtgtagaccattacgatatttatagagaaacaaaaggatcaatggaaaaaattgcaacatccaatacgacttcttatatggataaatatttactctctaatactacttataaatatgtagtgaaagctgttgatttagctggaaatgaatctgtacagagtgatatattcataattactacaaaaactgaaagcgtttcatatgaagaatgggatgcaaagaaagcatatgaaaagggagatagagttctacacgagggaaaagtatatgaagcagtccaaagttataaaggaaatggggatccaaactggatttatgccttatcattatggaaaacagtgtaa

SEQ ID NO: 84 - protein, 455 aa, Bacillus cereus
MNNRLLKQLQNMKMNKKSLGAVALTAGIIGTTLIPQNTYAHGFVEKPGSRSALCSPTYGALNVNCGSVMYEPQSLEAPKGFPQGGPVDGQIASAGGKFGGILDQQTANRWFKNTITGGENTFTWKYTAPHLTSKWHYYITKKGWNPNKALTRADFEPIGTVQHDGSAASNHLTHKINVPTDRSGYHVILAVWDVADTANAFYNVIDVNLINDVKPDTEAPSIPNRIQAQKVTANSIELAWNTSTDNVGVKGYQIFRNGEMIDTVPGTHFIDKKLQPSTEYSYTVKAIDAAGNVSKESATLTVKTTVEAPDTEAPTQPIGLHSMGTTASSVDLMWSPSDDNIGVDHYDIYRETKGSMEKIATSNTTSYMDKYLLSNTTYKYVVKAVDLAGNESVQSDIFIITTKTESVSYEEWDAKKAYEKGDRVLHEGKVYEAVQSYKGNGDPNWIYALSLWKTV

SEQ ID NO: 85 - DNA, 1368 bp, Bacillus thuringiensis
atgaataatcgattattaaaacaactacaaaacatgaaaatgaacaagaaaagtctaggagctgttgcattaacagccggaattattggtacgacgcttattcctcaaaacacatatgcgcatggttttgttgaaaaacctggcagtcgatctgctttatgtagtccaacttatggtgcattaaatgtaaattgcggaagtgttatgtatgaaccgcaaagcttagaagcaccaaaaggattcccgcaaggtggcccagttgatggacaaatcgcttctgcaggcggaaaatttggtggtattttagatcaacaaacagccgatcgttggtttaaaaatacaattacaggcggggaaaatacatttacgtggaaatatacagcgcctcacttaacgagcaaatggcattactatattacaaaaaaaggatgggatccaaataaagcgctcacaagagcagattttgaaccaattggaactgtgcaacatgatggttctgcagcctcaaatcatttaactcacaaaatcaatgtacctactgatagaagtggatatcatgtaattttagcagtatgggatgtagctgatactgcaaatgcattctataatgtcattgatgttaatctcatcaatgacgtaaaaccagacacagaagctccaagcattccaaatagaattcaggcacaaaaagtaacagcgaatagtatagaactagcatggaacgcttctacggataatgtaggggtaaaagggtatcaaatcttccgtaacggagaggtgattgatacagtaccaggaactcattttattgataaaaaattacaaccaagtacagaatactcttatactgtaaaagcaattgacgcagctggaaatgtatcgaaagaaagtgcaacgcttacagtgaaaacaacagttgaggctcctgatacagaagcaccaacacaaccaataggattacatagtatgggaacgacagcgtcaagtgtggatctaatgtggagtccttctgacgataatattggtgtagaccattacgatatttatagagaaacaaaaggatcaatggaaaaaattgcaacatccaatacgacttcttatatggataaatatttactctctaatactacttataaatatgtagtgaaagctgttgatgtagctggaaatgaatctgtacagagtgatatattcataattactacaaaaactgaaagcgtttcatatgaagaatgggatgcaaagaaagcatatgaaaagggagatagagttctacacgagggaaaagtatatgaagcagtccaaagttataaaggaaatggggatccaaactggatttatgccttatcattatggaaaacagtgtaa

SEQ ID NO: 86 - protein, 455 aa, Bacillus thuringiensis
MNNRLLKQLQNMKMNKKSLGAVALTAGIIGTTLIPQNTYAHGFVEKPGSRSALCSPTYGALNVNCGSVMYEPQSLEAPKGFPQGGPVDGQIASAGGKFGGILDQQTADRWFKNTITGGENTFTWKYTAPHLTSKWHYYITKKGWDPNKALTRADFEPIGTVQHDGSAASNHLTHKINVPTDRSGYHVILAVWDVADTANAFYNVIDVNLINDVKPDTEAPSIPNRIQAQKVTANSIELAWNASTDNVGVKGYQIFRNGEVIDTVPGTHFIDKKLQPSTEYSYTVKAIDAAGNVSKESATLTVKTTVEAPDTEAPTQPIGLHSMGTTASSVDLMWSPSDDNIGVDHYDIYRETKGSMEKIATSNTTSYMDKYLLSNTTYKYVVKAVDVAGNESVQSDIFIITTKTESVSYEEWDAKKAYEKGDRVLHEGKVYEAVQSYKGNGDPNWIYALSLWKTV

SEQ ID NO: 87 - DNA, 1368 bp, Bacillus cereus
atgaataatcgatttttaaaacaactacaaaacttgaaaatgaacaaaaaaagtataggagctgttgcattaacagctggaattatcggcacgacacttattcctcaaaatgcatacgcgcacggctttgttgaaaagcctggtagccgttccgctttatgtagcccaacttatggtgctctaaatgtaaactgcggaagtgttatgtatgaaccacaaagtttagaagctccaaaaggattcccacaaggtggcccagtggatgggcaaatcgcttctgcaggtggaaaatttggcggtattttagatcaacaagcagcggagcgttggtttaaaaatacaatcactggtggggaaaatacatttacttggaagtatacagcgcctcacttaacaagcaaatggcattactatattacaaaaaaaggatggaatccaaataaagcactaacaagagcggactttgagccaattggcactgtacaacatgatggttctgcagcttcaaataatgtaactcacaaaatcaatgtacctactgaccgtagtggatatcatgtaattttagcagtatgggatgtagctgatacagtaaatgcattctataatgtaattgatgttaacctcatcaacgatgtgaaaccagacacagaagctcctagtattccaaatggaattcaggcgcaaaaagtaacagcgaatagtatagaattaacatggaacacttctacagataatgtaggggtgaaagggtatcaaatcttccgaaacggagagatgattgacacagtactaggcactcattttattgataagaaattacaaccaagtacagaatactcttatactgtaaaagcaattgacgcagctggcaatgtatccaaagaaagtacagcgtttacagcaaaaacaacagttgaggctcctgatacagaagcaccaacacaaccaaaaggattacatagtatgggaacaacagcgtctagtgtggatttaatgtggagtccgtctgacgataatgttggtgtagaccattacgatatttatagagaaacagaagggtcaatgaaaaagattgcaacatctaatacgacttcttatatggatagaaatttacttgctaatactacttataaatatgtagtgaaagctgttgatgtagttggaaatgaatctgtacagagtgatacgttcacaattactacaaaaactgaaagcgcttcacatgaagagtgggatgcaaagaaagcatataaaaagggagatagagttttacacgagggaaaagtgtatgaagcagtccagaattatgaaggacatggggatccaaactggatttttgctttatccttatggaaagcagtgtaa

SEQ ID NO: 88 - protein, 455 aa, Bacillus cereus
MNNRFLKQLQNLKMNKKSIGAVALTAGIIGTTLIPQNAYAHGFVEKPGSRSALCSPTYGALNVNCGSVMYEPQSLEAPKGFPQGGPVDGQIASAGGKFGGILDQQAAERWFKNTITGGENTFTWKYTAPHLTSKWHYYITKKGWNPNKALTRADFEPIGTVQHDGSAASNNVTHKINVPTDRSGYHVILAVWDVADTVNAFYNVIDVNLINDVKPDTEAPSIPNGIQAQKVTANSIELTWNTSTDNVGVKGYQIFRNGEMIDTVLGTHFIDKKLQPSTEYSYTVKAIDAAGNVSKESTAFTAKTTVEAPDTEAPTQPKGLHSMGTTASSVDLMWSPSDDNVGVDHYDIYRETEGSMKKIATSNTTSYMDRNLLANTTYKYVVKAVDVVGNESVQSDTFTITTKTESASHEEWDAKKAYKKGDRVLHEGKVYEAVQNYEGHGDPNWIFALSLWKAV

SEQ ID NO: 89 - DNA, 1368 bp, Bacillus cereus
atgaagaatcgatttttaaaacaactacaaaacatgaaaatgaacaaaaaaagtctaggagctgttgcgttaacagctggaattattggcacaacacttattcctcaaaacgcatacgcgcacggttttgttgaaaaacctggcagccgatctgctttatgtagtccaacctatggtgcactaaatgtaaattgcggaagtgttatgtatgaaccgcaaagtttagaagctccaaaaggcttcccgcaaggtggcccagttgatggacaaatcgcttctgcaggtggtaaatttggtggtgtgttagatcaacaaacagcagatcgttggtttaaaaatacaatcactggtggagaaaatacatttacttggaagtatacagcgcctcatttaacgagcgaatggcattactatattacaaaaaaaggatggaatccaaataaagcgctcacaagagcagattttgaaccgattggaactgtacaacatgatggttctgcagcctcaaatcatttaactcacaaaatcaatgtacctactgatcgtagtggatatcatgtgattttagcagtatgggatgtagccgatacagcaaatgcattctataatgttattgatgttaatctcatcaatgacgtaaaaccagatacagaggctccaagtattccaaatggaattcaggccaaaaaagtaacagcgcatagtattgaactagcatggaccgcttctacggataatgtaggggtaaaaggatatcaaatcttccgtaatggagagatgatcgacacagtaccaggcactcattttattgataaaaaattacaaccaagcacggaatattcttatactgtaaaagcgattgacgcagctggaaatgcttcgaaagaaagtgcaaagcttacagtaaaaacgacagttgaggctcccgatacagaagcaccaacacaaccaaaaggattacatagtatgggaacaacaacatcaagtgtggatttaatgtggagtccttccgacgataatattggtgtagaccattacgatatttatagagaaacagaaggatcgatgaaaaagattgcaacatccaatacgacttcttatatggataaaaatttactccctaatactacttataaatatgtagtgaaagctgttgatgtagttggaaatgaatctgtacagagtgatgtattcacaattactacaaaaactgaaagcgctacatacgaagagtgggatgcaacgaaagcatatgaaaaaggagatagagttctatacgagggaaaagtatatgaagcagtccagagttataaaggaaatggggatccaaactggatttatgccttatcattatggaaaacagtataa

SEQ ID NO: 90 - protein, 455 aa, Bacillus cereus
MKNRFLKQLQNMKMNKKSLGAVALTAGIIGTTLIPQNAYAHGFVEKPGSRSALCSPTYGALNVNCGSVMYEPQSLEAPKGFPQGGPVDGQIASAGGKFGGVLDQQTADRWFKNTITGGENTFTWKYTAPHLTSEWHYYITKKGWNPNKALTRADFEPIGTVQHDGSAASNHLTHKINVPTDRSGYHVILAVWDVADTANAFYNVIDVNLINDVKPDTEAPSIPNGIQAKKVTAHSIELAWTASTDNVGVKGYQIFRNGEMIDTVPGTHFIDKKLQPSTEYSYTVKAIDAAGNASKESAKLTVKTTVEAPDTEAPTQPKGLHSMGTTTSSVDLMWSPSDDNIGVDHYDIYRETEGSMKKIATSNTTSYMDKNLLPNTTYKYVVKAVDVVGNESVQSDVFTITTKTESATYEEWDATKAYEKGDRVLYEGKVYEAVQSYKGNGDPNWIYALSLWKTV

SEQ ID NO: 91 - DNA, 1377 bp, Bacillus thuringiensis
atgaaattgaaattaacatctaaattggaaagattaagaacaagtaaaaaggggattggtgcttgtgttttggctgcaggcatgacggcaatcacaatggctcctcaaagtgcgtatgcacatgggtttgttgaaaagccgagtagtcgtgctgctttatgtagtcagaattatggggtattaaatttaaattgtggaaatgtaatgtacgaacctcaaagtctagaagcacctaaaggatttccagatagtggaccgattgatgggaaaatcgcttcggcaggagggttgtttggaggtattcttgaccaacaaacatcaaatcgttggttcaaaaacacaattaaaggtggagtaaatacgtttacatggaaatatacagcagcacattctacaagtaaatggcattattacattacaaaaaagggatgggatcctaacaaaccattaacacgtgctgaattagaaccaatcggaactgtgaaacatgacggttcggctgcatcaaataatttaacacatacaattaatgtaccaactgatcgtaatggttatcatgttattttagctgtatgggatgtagcagatacgtcaaatgctttttataatgtagttgatgtaaatttagtaaataatgaaactcctgatacagtagctccaagtcaaccaactgaattaaatgcctctaaagtttctgccaatagtgttgaaataacatggaaggcttccactgataatataggtgtaaaagaatatcaagtgttacgtaatggagaagtaattgatacggtaccaggtacaacttttattgataaaaaattaaaagcagatacggaatatacttatacaataaaggcattagactctgctggaaacatatcaaaagaaagtgaaaaactgaaggttaagacaacacatacaatccccgatatagaggctccaactcaaccaaaaggattacatagtatgggtacaacatcgacaactgttgatttaatgtggagtccgtcagaagataatgtaggtgttgaccattatattgtatatagagaaagcgctggggttatgaataaaattggaacagcggctaatacatcctttatggataaagatttgaaggctaatacatcgtataattatgtagtgacggcggttgatttagctggaaatgaatctagtagaagtgatgttttgaatgtaacaacaaagtcagagaattccgcatatgaaaaatgggatgcaagaaaagcatatactaaaggtgatagagtagtacatgaggggaaagtgtacgaagcggttcaaaatcatcaaggaaatggcgactcaaattggatttttgctttatcgctttggaagccagttttgaataaatga

SEQ ID NO: 92 - protein, 458 aa, Bacillus thuringiensis
MKLKLTSKLERLRTSKKGIGACVLAAGMTAITMAPQSAYAHGFVEKPSSRAALCSQNYGVLNLNCGNVMYEPQSLEAPKGFPDSGPIDGKIASAGGLFGGILDQQTSNRWFKNTIKGGVNTFTWKYTAAHSTSKWHYYITKKGWDPNKPLTRAELEPIGTVKHDGSAASNNLTHTINVPTDRNGYHVILAVWDVADTSNAFYNVVDVNLVNNETPDTVAPSQPTELNASKVSANSVEITWKASTDNIGVKEYQVLRNGEVIDTVPGTTFIDKKLKADTEYTYTIKALDSAGNISKESEKLKVKTTHTIPDIEAPTQPKGLHSMGTTSTTVDLMWSPSEDNVGVDHYIVYRESAGVMNKIGTAANTSFMDKDLKANTSYNYVVTAVDLAGNESSRSDVLNVTTKSENSAYEKWDARKAYTKGDRVVHEGKVYEAVQNHQGNGDSNWIFALSLWKPVLNK

SEQ ID NO: 93 - DNA, 1368 bp, Bacillus cereus
atgaagaatcgatttttaaaacaactacaaaacatgaaaatgaacaaaaaaagtctaggagctgttgcgttaacagctggaattattggcacaacacttattcctcaaaacgcatacgcgcacggttttgttgaaaaacctggcagccgatctgctttatgtagtccaacctatggtgcactaaatgtaaattgcggaagtgttatgtatgaaccgcaaagtttagaagctccaaaaggcttcccgcaaggtggcccagttgatggacaaatcgcttctgcaggtggtaaatttggtggtgtgttagatcaacaaacagcagatcgttggtttaaaaatacaatcactggtggagaaaatacatttacttggaagtatacagcgcctcatttaacgagcaaatggcattactatattacaaaaaaaggatggaatccaaataaagcgctcacaagagcagattttgaaccgattggaactgtacaacatgatggttctgcagcctcaaatcatttaactcacaaaatcaatgtacctactgatcgtagtggatatcatgtgattttagcagtatgggatgtagccgatacagcaaatgcattctataatgttattgatgttaatctcatcaatgacgtaaaaccagatacagaggctccaagtattccaaatggaattcaggcccaaaaagtaacagcgcatagtattgaactagcatggaccgcttctacggataatgtaggggtaaaaggatatcaaatcttccgtaacggagagatgatcgacacagtaccgggcactcattttattgataaaaaattacaaccaagcacggaatattcttatactgtaaaagcgattgacgcagctggaaatgcttcgaaagaaagtgcaaagcttacagtaaaaacgacagttgaggctcccgatacagaagcaccaacacaaccaaaaggattacatagtatgggaacaacaacatcaagtgtggatttaatgtggagtccttccgacgataatattggtgtagaccattacgatatttatagagaaacagaaggatcgatgaaaaagattgcaacatccaatacgactgcttatatcgataaaaatttactccctaatactacttataaatatgtagtgaaagctgttgatgtagctggaaatgaatctgtacagagtgatatattcacaattactacaaaaactgaaagcgcttcatacgaagagtgggatgcaacgaaagcatatgaaaaaggagatagagttctatacgagggaaaagtatatgaagcagtgcagagttataaaggaaatggggatccaaactggatttatgctttatcattatggaaaacagtataa

SEQ ID NO: 94 - protein, 455 aa, Bacillus cereus
MKNRFLKQLQNMKMNKKSLGAVALTAGIIGTTLIPQNAYAHGFVEKPGSRSALCSPTYGALNVNCGSVMYEPQSLEAPKGFPQGGPVDGQIASAGGKFGGVLDQQTADRWFKNTITGGENTFTWKYTAPHLTSKWHYYITKKGWNPNKALTRADFEPIGTVQHDGSAASNHLTHKINVPTDRSGYHVILAVWDVADTANAFYNVIDVNLINDVKPDTEAPSIPNGIQAQKVTAHSIELAWTASTDNVGVKGYQIFRNGEMIDTVPGTHFIDKKLQPSTEYSYTVKAIDAAGNASKESAKLTVKTTVEAPDTEAPTQPKGLHSMGTTTSSVDLMWSPSDDNIGVDHYDIYRETEGSMKKIATSNTTAYIDKNLLPNTTYKYVVKAVDVAGNESVQSDIFTITTKTESASYEEWDATKAYEKGDRVLYEGKVYEAVQSYKGNGDPNWIYALSLWKTV

SEQ ID NO: 95 - DNA, 1353 bp, Bacillus thuringiensis
ttggaaagattaagaacaagtaaaaaggggattggtgcttgtgttttggctgcaggcatgacggcaatcacaatggctcctcaaagtgcgtatgcacatgggtttgttgaaaagccgagtagtcgtgctgctttatgtagtcagaattatggggtattaaatttaaattgtggaaatgtaatgtacgaacctcaaagtctagaagcacctaaaggatttccagatagtggaccgattgatgggaaaatcgcttcggcaggagggttgtttggaggtattcttgaccaacaaacatcaaatcgttggttcaaaaacacaattaaaggtggagtaaatacgtttacatggaaatatacagcagcacattctacaagtaaatggcattattacattacaaaaaagggatgggatcctaacaaaccattaacacgtgctgaattagaaccaatcggaactgtgaaacatgacggttcggctgcatcaaataatttaacacatacaattaatgtaccaactgatcgtaatggttatcatgttattttagctgtatgggatgtagcagatacgtcaaatgctttttataatgtagttgatgtaaatttagtaaataatgaaactcctgatacagtagctccaagtcaaccaactgaattaaatgcctctaaagtttctgccaatagtgttgaaataacatggaaggcttccactgataatataggtgtaaaagaatatcaagtgttacgtaatggagaagtaattgatacggtaccaggtacaacttttattgataaaaaattaaaagcagatacggaatatacttatacaataaaggcattagactctgctggaaacatatcaaaagaaagtgaaaaactgaaggttaagacaacacatacaatccccgatatagaggctccaactcaaccaaaaggattacatagtatgggtacaacatcgacaactgttgatttaatgtggagtccgtcagaagataatgtaggtgttgaccattatattgtatatagagaaagcgctggggttatgaataaaattggaacagcggctaatacatcctttatggataaagatttgaaggctaatacatcgtataattatgtagtgacggcggttgatttagctggaaatgaatctagtagaagtgatgttttgaatgtaacaacaaagtcagagaattccgcatatgaaaaatgggatgcaagaaaagcatatactaaaggtgatagagtagtacatgaggggaaagtgtacgaagcggttcaaaatcatcaaggaaatggcgactcaaattggatttttgctttatcgctttggaagccagttttgaataaatga

SEQ ID NO: 96 - protein, 450 aa, Bacillus thuringiensis
MERLRTSKKGIGACVLAAGMTAITMAPQSAYAHGFVEKPSSRAALCSQNYGVLNLNCGNVMYEPQSLEAPKGFPDSGPIDGKIASAGGLFGGILDQQTSNRWFKNTIKGGVNTFTWKYTAAHSTSKWHYYITKKGWDPNKPLTRAELEPIGTVKHDGSAASNNLTHTINVPTDRNGYHVILAVWDVADTSNAFYNVVDVNLVNNETPDTVAPSQPTELNASKVSANSVEITWKASTDNIGVKEYQVLRNGEVIDTVPGTTFIDKKLKADTEYTYTIKALDSAGNISKESEKLKVKTTHTIPDIEAPTQPKGLHSMGTTSTTVDLMWSPSEDNVGVDHYIVYRESAGVMNKIGTAANTSFMDKDLKANTSYNYVVTAVDLAGNESSRSDVLNVTTKSENSAYEKWDARKAYTKGDRVVHEGKVYEAVQNHQGNGDSNWIFALSLWKPVLNK

SEQ ID NO: 97 - DNA, 1353 bp, Bacillus thuringiensis
ttggaaagattaagaacaagtaaaaaggggattggtgcttgtgttttggctgcaggcatgacggcaatcacaatggctcctcaaagtgcgtatgcacatgggtttgttgaaaagccgagtagtcgtgctgctttatgtagtcagaattatggggtattaaatttaaattgtggaaatgtaatgtacgaacctcaaagtctagaagcacctaaaggatttccagatagtggaccgattgatgggaaaatcgcttcggcaggagggttgtttggaggtattcttgaccaacaaacatcaaatcgttggttcaaaaacacaattaaaggtggagtaaatacatttacatggaaatatacagcagcacattctacaagtaaatggcattattacattacaaaaaagggatgggatcctaacaaaccattaacacgtgctgaattagaaccaatcggaactgtgaaacatgacggttcggctgcatcaaataatttaacacatacaattaatgtaccaactgatcgtaatggttatcatgttattttagctgtatgggatgtagcagatacgtcaaatgctttttataatgtagttgatgtaaatttagtaaataatgaaactcctgatacagtagctccaagtcaaccaactgaattaaatgcctctaaagtttctgccaatagtgttgaaataacatggaaggcttccactgataatataggtgtaaaagaatatcaagtgttacgtaatggagaagtaattgatacggtaccaggtacaacttttattgataaaaaattaaaagcagatacggaatatacttatacaataaaggcattagactctgctggaaacatatcaaaagaaagtgaaaaactgaaggttaagacaacacatacaatccccgatatggaggctccaactcaaccaaaaggattacatagtatgggtacaacatcgacaactgttgatttaatgtggagtccgtcagaagataatgtaggtgttgaccattatattgtatatagagaaagcgctggggttatgaataaaattggaacagcggctaatacatcctttatggataaagatttgaaggctaatacatcgtataattatgtagtgacggcggttgatttagctggaaatgaatctagtagaagtgatgttttgaatgtaacaacaaagtcagagaattccgcatatgaaaaatgggatgcaagaaaagcatatactaaaggtgatagagtagtacatgaggggaaagtgtacgaagcggttcaaaatcatcaaggaaatggcgactcaaattggatttttgctttatcgctttggaagccagttttgaataaatga

SEQ ID NO: 98 - protein, 450 aa, Bacillus thuringiensis
MERLRTSKKGIGACVLAAGMTAITMAPQSAYAHGFVEKPSSRAALCSQNYGVLNLNCGNVMYEPQSLEAPKGFPDSGPIDGKIASAGGLFGGILDQQTSNRWFKNTIKGGVNTFTWKYTAAHSTSKWHYYITKKGWDPNKPLTRAELEPIGTVKHDGSAASNNLTHTINVPTDRNGYHVILAVWDVADTSNAFYNVVDVNLVNNETPDTVAPSQPTELNASKVSANSVEITWKASTDNIGVKEYQVLRNGEVIDTVPGTTFIDKKLKADTEYTYTIKALDSAGNISKESEKLKVKTTHTIPDMEAPTQPKGLHSMGTTSTTVDLMWSPSEDNVGVDHYIVYRESAGVMNKIGTAANTSFMDKDLKANTSYNYVVTAVDLAGNESSRSDVLNVTTKSENSAYEKWDARKAYTKGDRVVHEGKVYEAVQNHQGNGDSNWIFALSLWKPVLNK

SEQ ID NO: 99 - DNA, 699 bp, Bacillus thuringiensis
atgaatatgaataatcgatttttaaaacaactacaaaacatgaaaatgaacaaaaaaagtctaggagctgtagcattaacagctggaattattagtacgacccttattccgcaaaatgcttatgcgcacggttttgttgaaaagcctggtagtcgatccgctttatgtagtccaacttatggtgcactaaatgtaaactgcggaagtgttatgtatgaaccgcaaagcttagaagctccaaaagggttcccacaaggtggtccagttgatggacaaatcgcttctgcaggcggaaaatttggcggtattttagatcaacaaacagcaaatcgttggtttaaaaatacaatcactggtggggagaatacatttacttggaagtatactgcgcctcacttaacgagcaagtggcattactatattactaaaaaaggatggaattcaaataaagcgctaacaagagcagattttgaaccaattggaactgtacaacatgatggttctgcagcttcaaataatttaactcataaaatcaatgtacctactgatcgtagtggatatcatgtgattttagcagtatgggatgtagctgatacagcaaatgcattctataatgtaattgatgttaatcttattaatgatgtgaaaccagacatagaagcgccaagtattccaaatggacttcagacgaaaaagtaa

SEQ ID NO: 100 - protein, 232 aa, Bacillus thuringiensis
MNMNNRFLKQLQNMKMNKKSLGAVALTAGIISTTLIPQNAYAHGFVEKPGSRSALCSPTYGALNVNCGSVMYEPQSLEAPKGFPQGGPVDGQIASAGGKFGGILDQQTANRWFKNTITGGENTFTWKYTAPHLTSKWHYYITKKGWNSNKALTRADFEPIGTVQHDGSAASNNLTHKINVPTDRSGYHVILAVWDVADTANAFYNVIDVNLINDVKPDIEAPSIPNGLQTKK

SEQ ID NO: 101 - DNA, 1377 bp, Bacillus mycoides
atgaatttgaaattaacatctaagttagaaagattaagaaaaagtaaaaaaggaattggtgcttgtgttttagctgcaggggtgacggcaattacaatgattcctcaaagtgcatatgcacatgggtttgttgaaaagccgagtagtcgtgctgctttatgtagtcagaattatggagcattaaatttaaattgtggaaatgtaatgtacgaacctcaaagtctagaagcacctaaaggattcccagatggtggaccgattgatgggaaaatcgcttcggcaggaggactgtttggagggattcttgaccaacaaacatcaaatcgctggttcaaaaacacaataaaggggggagcaaatacatttacatggaaatacacagcggcacattctacaagtaaatggcattattacattaccaaaaagggatgggatcctaataaaccattaacacgtgctgaattagaaccaattggaactgtgaaacatgacggttcggcagcatcaaataatttaacacatacaattaatgtaccaactgatcgcaatggttatcatgttattttagctgtatgggatgtagcagatacgtcaaatgcgttttataatgtaattgatgtaaatctagtaaataatgaagctcccgatacagtagctccaagtcaaccaactggattaaatgcgtctaaagtttctgccaatagtgttgaactaacatggaaggcctctactgataatataggtgtaaaagaatatcaagtgttacgcaatggagaagtaattgatacggtaccaggtacaacttttattgataaaaaactaaaagcaaatacggaatatacctatacaataaaggcattagactctgctggaaatatatcaaaagaaagtgaaaaactaaaggttaagacaacaaatgcaatcccagatatagaggctccgactcaacctaaaggattacatagtatgggtacaacagcgacaactgttgatttgatgtggagtccgtctgaagataatgtaggtgttgaccattatgttgtatatagagaaaacgcaggggttatgaataaaattgggacaacggataatacatcctttgtggataaaaatttaaaggcaaatacatcgtacaaatatgtagtgacagcggttgatttagctagaaatgagtctagtagaagtgatgttttaactgtagcaacaaaactagatggctctacttatgaaaaatgggatgcaagaaaagcatacaataaaggtgataaagtagtacatgagggaaaagtgtatgaagcggttcaaagttatcaagggaacggcgatccaaattggatttttgcactatcgatttggaagccagttttaaataaatga

SEQ ID NO: 102 - protein, 458 aa, Bacillus mycoides
MNLKLTSKLERLRKSKKGIGACVLAAGVTAITMIPQSAYAHGFVEKPSSRAALCSQNYGALNLNCGNVMYEPQSLEAPKGFPDGGPIDGKIASAGGLFGGILDQQTSNRWFKNTIKGGANTFTWKYTAAHSTSKWHYYITKKGWDPNKPLTRAELEPIGTVKHDGSAASNNLTHTINVPTDRNGYHVILAVWDVADTSNAFYNVIDVNLVNNEAPDTVAPSQPTGLNASKVSANSVELTWKASTDNIGVKEYQVLRNGEVIDTVPGTTFIDKKLKANTEYTYTIKALDSAGNISKESEKLKVKTTNAIPDIEAPTQPKGLHSMGTTATTVDLMWSPSEDNVGVDHYVVYRENAGVMNKIGTTDNTSFVDKNLKANTSYKYVVTAVDLARNESSRSDVLTVATKLDGSTYEKWDARKAYNKGDKVVHEGKVYEAVQSYQGNGDPNWIFALSIWKPVLNK

SEQ ID NO: 103 - DNA, 1368 bp, Bacillus thuringiensis
atgaataatcgattattaaaacaactacaaaacatgaaaatgaacaaaaaaagtctaggagctgttgcattaacagctggaattattggcacgacacttattcctcaaaacgcatacgcgcacggttttgttgaaaagcctggtagccgatctgctttatgtagtccaacctatggtgcactaaatacaaattgcggaagtgttatgtatgaaccacaaagtctggaagctccaaaaggcttcccacaaggtggcccagttgatggacaaatcgcttctgcaggtggtaaatttggtggtattttagatcaacaaacagccgatcgttggtttaaaaatacaattacaggcggggaaaatacatttacttggaagtatacagcgcctcacttaacgagtaaatggcattactatattacaaaaaaaggatggaatccaaataaagcgctcacaagagctgattttgaaccgattggaactgtacaacatgatggttctgcagcctcaaatcatttaactcacaaaattaatgtacctactgatagaagtggatatcatgtgattttagcggtatgggatgtagctgatacagcaaatgcattctataatgtaattgatgttaatctcatcaatgacgtaaaaccagacacagaagctccaagcattccaaatagaattcaggcacaaaaagtaacagcgaatagtatagaactagcatggaacgcttctactgataatgtaggggtaaaagggtatcaaatcttccgtaacggagagatgatcgacacagtaccgggcactcattttattgataaaaaattacaaccaagcacgaaatattcttatactgtaaaagcgattgacgcagctggaaatgtatcgaaagaaagtgcaacgcttacagtgaaaacaacagttgaggttcctgatacagaagcaccaacacaaccaaaaggattacatagtatgggaacgacagcgtcaagtgtggatctaatgtggagtccttctgacgataatattggtgtagaccattacgatatttatagagaaacaaaagggttaatggaaaaaattgcaacatccaatacgacttcttatatggataaatatttactctctaatactacttataaatatgtagtgaaagctgttgatgtagctggaaatgaatctgtacagagtgatatattcataattactacaaaaactgaaagcgtttcatatgaagaatgggatgcaaagaaagcatatgaaaagggagataaagttctacacgagggaaaagtatatgaagcagtccaaagttataaaggaaatggggatccaaactggatttatgccttatcattatggaaaacagtgtaa

SEQ ID NO: 104 - protein, 455 aa, Bacillus thuringiensis
MNNRLLKQLQNMKMNKKSLGAVALTAGIIGTTLIPQNAYAHGFVEKPGSRSALCSPTYGALNTNCGSVMYEPQSLEAPKGFPQGGPVDGQIASAGGKFGGILDQQTADRWFKNTITGGENTFTWKYTAPHLTSKWHYYITKKGWNPNKALTRADFEPIGTVQHDGSAASNHLTHKINVPTDRSGYHVILAVWDVADTANAFYNVIDVNLINDVKPDTEAPSIPNRIQAQKVTANSIELAWNASTDNVGVKGYQIFRNGEMIDTVPGTHFIDKKLQPSTKYSYTVKAIDAAGNVSKESATLTVKTTVEVPDTEAPTQPKGLHSMGTTASSVDLMWSPSDDNIGVDHYDIYRETKGLMEKIATSNTTSYMDKYLLSNTTYKYVVKAVDVAGNESVQSDIFIITTKTESVSYEEWDAKKAYEKGDKVLHEGKVYEAVQSYKGNGDPNWIYALSLWKTV

SEQ ID NO: 105 - DNA, 1377 bp, Bacillus thuringiensis
atgaatttgaaattaacatctaaattggaaagattaagaaaaagtaaaaaaggaattggtgcttgtcttctggctgcaggggtgacggcaattacaatgattcctcaaagtgcgtatgcacatgggtttgttgaaaaaccgagtagtcgtgctgctttatgtagtcagaattatggggcattaaatttaaattgtggaaatgtaatgtatgaacctcaaagtctagaagcacctaaagggtttccagatggtggaccgattgatgggaaaatcgcttcggcaggaggattatttggaggaactcttgaccaacaaacaacaaatcgttggttcaaaaacacaattaaggggggagaaaatacatttacatggaaatatacagcagcacattctacaagtaaatggcattattacattacaaaaaagggatgggatcctaacaaaccgttaacacgtgctgaattagaaccaattggaactgtgaaacatgacggttcggctgcatcaaataatttaacacatacaattaatgtaccaactgatcgtaatggttatcatgttattttagctgtatgggatgtagcagatacgtcaaatgccttttataatgtaattgatgtaaatttggtaaataatgaaacacctgatacagtagctccaagtcaaccaactgaattaaatgcctctaaagtttctgccaatagtgttgaaataacatggaaggcttctactgataatataggtgtaaaagaatatcaagtgttacgtaatggagaagtaattgatacggtaccaggtacaacttttattgataaaaagttaaaagcagatacggaatatacctatacaataaaggcattagactctgctggaaacatatcaaaagaaagtgaaaaactaaaggttaagacaacacatgcaatcccagataaagaggctccgactcaaccaaaaggattacatagtatgggtacaacagcgacaactgttgatttgatgtggagtccgtcagaagataatgtagatgttgaccattatattgtatatagagaaagcgctggggttatgaataaaattgggacatcagctaatacatcctttatagataaaggtttgaaggctaatacatcgtataaatatgtagtgacagcggttgatttagctggaaatgaatctagtagaagtgatgttttgaatataactactaagttagaggattccacatatgaaaaatgggatgcaagaaaagtatatactaaaggtgatagggtagtacatgagggaaaagtgtatgaagcggttcaagatcatcaaggaaatggcgactcaaattggatttttgccttatcgctttggaagccagttttgaataaatga

SEQ ID NO: 106 - protein, 458 aa, Bacillus thuringiensis
MNLKLTSKLERLRKSKKGIGACLLAAGVTAITMIPQSAYAHGFVEKPSSRAALCSQNYGALNLNCGNVMYEPQSLEAPKGFPDGGPIDGKIASAGGLFGGTLDQQTTNRWFKNTIKGGENTFTWKYTAAHSTSKWHYYITKKGWDPNKPLTRAELEPIGTVKHDGSAASNNLTHTINVPTDRNGYHVILAVWDVADTSNAFYNVIDVNLVNNETPDTVAPSQPTELNASKVSANSVEITWKASTDNIGVKEYQVLRNGEVIDTVPGTTFIDKKLKADTEYTYTIKALDSAGNISKESEKLKVKTTHAIPDKEAPTQPKGLHSMGTTATTVDLMWSPSEDNVDVDHYIVYRESAGVMNKIGTSANTSFIDKGLKANTSYKYVVTAVDLAGNESSRSDVLNITTKLEDSTYEKWDARKVYTKGDRVVHEGKVYEAVQDHQGNGDSNWIFALSLWKPVLNK

SEQ ID NO: 107 - DNA, 1353 bp, Bacillus thuringiensis
ttggaaagattaagaaaaagtaaaaaaggaattggtgcttgtcttctggctgcaggggtgacggcaattacaatgattcctcaaagtgcgtatgcacatgggtttgttgaaaaaccgagtagtcgtgctgctttatgtagtcagaattatggggcattaaatttaaattgtggaaatgtaatgtatgaacctcaaagtctagaagcacctaaagggtttccagatggtggaccgattgatgggaaaatcgcttcggcaggaggattatttggaggaactcttgaccaacaaacaacaaatcgttggttcaaaaacacaattaaggggggagaaaatacatttacatggaaatatacagcagcacattctacaagtaaatggcattattacattacaaaaaagggatgggatcctaacaaaccgttaacacgtgctgaattagaaccaattggaactgtgaaacatgacggttcggctgcatcaaataatttaacacatacaattaatgtaccaactgatcgtaatggttatcatgttattttagctgtatgggatgtagcagatacgtcaaatgccttttataatgtaattgatgtaaatttggtaaataatgaaacacctgatacagtagctccaagtcaaccaactgaattaaatgcctctaaagtttctgccaatagtgttgaaataacatggaaggcttctactgataatataggtgtaaaagaatatcaagtgttacgtaatggagaagtaattgatacggtaccaggtacaacttttattgataaaaagttaaaagcagatacggaatatacctatacaataaaggcattagactctgctggaaacatatcaaaagaaagtgaaaaactaaaggttaagacaacacatgcaatcccagataaagaggctccgactcaaccaaaaggattacatagtatgggtacaacagcgacaactgttgatttgatgtggagtccgtcagaagataatgtagatgttgaccattatattgtatatagagaaagcgctggggttatgaataaaattgggacatcagctaatacatcctttatagataaaggtttgaaggctaatacatcgtataaatatgtagtgacagcggttgatttagctggaaatgaatctagtagaagtgatgttttgaatataactactaagttagaggattccacatatgaaaaatgggatgcaagaaaagtatatactaaaggtgatagggtagtacatgagggaaaagtgtatgaagcggttcaagatcatcaaggaaatggcgactcaaattggatttttgccttatcgctttggaagccagttttgaataaatga

SEQ ID NO: 108 - protein, 450 aa, Bacillus thuringiensis
MERLRKSKKGIGACLLAAGVTAITMIPQSAYAHGFVEKPSSRAALCSQNYGALNLNCGNVMYEPQSLEAPKGFPDGGPIDGKIASAGGLFGGTLDQQTTNRWFKNTIKGGENTFTWKYTAAHSTSKWHYYITKKGWDPNKPLTRAELEPIGTVKHDGSAASNNLTHTINVPTDRNGYHVILAVWDVADTSNAFYNVIDVNLVNNETPDTVAPSQPTELNASKVSANSVEITWKASTDNIGVKEYQVLRNGEVIDTVPGTTFIDKKLKADTEYTYTIKALDSAGNISKESEKLKVKTTHAIPDKEAPTQPKGLHSMGTTATTVDLMWSPSEDNVDVDHYIVYRESAGVMNKIGTSANTSFIDKGLKANTSYKYVVTAVDLAGNESSRSDVLNITTKLEDSTYEKWDARKVYTKGDRVVHEGKVYEAVQDHQGNGDSNWIFALSLWKPVLNK

SEQ ID NO: 109 - DNA, 1368 bp, Bacillus thuringiensis
atgaataatcgattattaaaacaactacaaaacatgaaaatgaacaaaaaaagtctaggagctgttgcattaacagctggaattattggtacgacgcttattcctcaaaacacatatgcgcatggttttgttgaaaaacctggcagtcgatctgctttatgtagtccaacttatggtgcactaaatgtaaattgcggaagtgttatgtatgaaccacaaagcttagaagcaccaaaaggattcccgcaaggtggcccagttgatggacaaatcgcttctgcaggtggtaagtttggtggtattttagatcaacaaacagccgatcgttggtttaaaaatacaattacaggcggggaaaatacatttacgtggaaatatacagcgcctcacttaacgagcaaatggcattactatattacaaaaaaaggatggaatccaaataaagcgctcacaagagcagattttgaaccaattggaactgtgcaacatgatggctctgcagcctcaaatcatttaactcacaaaattaatgtacctactgatagaagtggatatcatgtaattttagcagtatgggatgtagctgatacagcaaatgcattctataatgtaattgatgttaatctcatcaatgacgtaaaaccagacacagaagctccaagcattccaaatagaattcaggcacaaaaagtaacagcgaatagtatagaactagcatggaacgcttctactgataatgtaggggtaaaagggtatcaaatcttccgtaacggagagatgattgatacagtaccaggaacttattttattgataaaaaattacaaccaagtacagaatactcttatactgtaaaagcaattgacgcagctggaaatgtatcgaaagaaagtgcaacgcttacagtgaaaacaacagttgaggttcctgatacagaagcaccaacacaaccaaaaggattacatagtatgggaacgacagcgtcaagtgtggatctaatgtggagtccttctgacgataatattggtgtagaccattacgatatttatagagaaacaaaagggttaatggaaaaaattgcaacatccaatacgacttcttatatggataaatatttactctctaatactacttataaatatgtagtgaaagctgttgatgtagctggaaatgaatctgtacagagtgatatattcataattactacaaaaactgaaagcgtttcatatgaagaatgggatgcaaagaaagcatatgaaaagggagatagagttctacacgagggaaaagtatatgaagcagtccaaagttataaaggaaatggggatccaaactggatttatgccttatcattatggaaaacagtgtaa

SEQ ID NO: 110 - protein, 455 aa, Bacillus thuringiensis
MNNRLLKQLQNMKMNKKSLGAVALTAGIIGTTLIPQNTYAHGFVEKPGSRSALCSPTYGALNVNCGSVMYEPQSLEAPKGFPQGGPVDGQIASAGGKFGGILDQQTADRWFKNTITGGENTFTWKYTAPHLTSKWHYYITKKGWNPNKALTRADFEPIGTVQHDGSAASNHLTHKINVPTDRSGYHVILAVWDVADTANAFYNVIDVNLINDVKPDTEAPSIPNRIQAQKVTANSIELAWNASTDNVGVKGYQIFRNGEMIDTVPGTYFIDKKLQPSTEYSYTVKAIDAAGNVSKESATLTVKTTVEVPDTEAPTQPKGLHSMGTTASSVDLMWSPSDDNIGVDHYDIYRETKGLMEKIATSNTTSYMDKYLLSNTTYKYVVKAVDVAGNESVQSDIFIITTKTESVSYEEWDAKKAYEKGDRVLHEGKVYEAVQSYKGNGDPNWIYALSLWKTV

SEQ ID NO: 111 - DNA, 1377 bp, Bacillus cereus
atgaatttgaaattaatatctaaattagaaagattaagaaaaagtaaaaaaggaattggtgcttttgttctggctgcaggggtgacggcaattacaatggttcctcaaagtgcgtatgcacatgggtttgttgaaaagccaagtagtcgtgctgctttatgtagtcagaattatggggcattaaacttaaattgtggaaatgtaatgtacgaacctcaaagtctagaagcacctaaaggattcccagatggtggaccgattgatggaaaaattgcttcggcaggaggattgtttggaggaactcttgaccaacaaacatcaagtcgctggttcaaaaacacaattaagggtggagcaaatacatttacatggaaatatacagcggcacattctacaagcaaatggcattattacattacaaaaaagggatgggatcctaataaaccattaacacgtgctgaattagaaccaattggaactgtgaaacatgacggctcggccgcatcaaataatttaacacatacaattaatgtaccaactgatcgtaatggttatcatgttattttagctgtatgggatgtagcagatacgtcaaatgcgttttataatgtaattgatgtaaatttagtaaataatgaaactcctgatacagtagctccaagtcaaccaactggattaaatgcgtctaaagttgctgccaatagtgttgaaataacatggaaggcctctactgataatataggtgtaaaagaatatcaagtgttacgcaatggagaagtaattgatacggtaccaggtacaacttttattgataaaaaactaaaagcagatacggaatatacctatacaataaaggcattagacactgctggaaacatatcaaaagaaagtgaaaaactaaaagttaagacaacaaatgaaactccagatatagaggctccgactcaaccgaaaggattacatagtatgggtacaacagcgacaactgttgatttgatgtggagtccatctgaagataatgtaggtgttgaccattatattgtatatagagaaagcgctggggttatgaataaaattgggacagcggataatacatcctttatggataaaaatttgaaggctaatacatcgtacaaatatgtagtgacggcggttgatttagctggaaatgaatctagtagaagtgatgttttgaatgtaactacaaagtcagaggattccacatatgaaaaatgggatgcaagaaaagcatatactaaaggtgatagagtagtatatgagggaaaagtatatgaagcggttcaagatcatcaaggaaatggcgactcaaattggatttttgccctatcgctttggaagccagttatgaataaatga

SEQ ID NO: 112 - protein, 458 aa, Bacillus cereus
MNLKLISKLERLRKSKKGIGAFVLAAGVTAITMVPQSAYAHGFVEKPSSRAALCSQNYGALNLNCGNVMYEPQSLEAPKGFPDGGPIDGKIASAGGLFGGTLDQQTSSRWFKNTIKGGANTFTWKYTAAHSTSKWHYYITKKGWDPNKPLTRAELEPIGTVKHDGSAASNNLTHTINVPTDRNGYHVILAVWDVADTSNAFYNVIDVNLVNNETPDTVAPSQPTGLNASKVAANSVEITWKASTDNIGVKEYQVLRNGEVIDTVPGTTFIDKKLKADTEYTYTIKALDTAGNISKESEKLKVKTTNETPDIEAPTQPKGLHSMGTTATTVDLMWSPSEDNVGVDHYIVYRESAGVMNKIGTADNTSFMDKNLKANTSYKYVVTAVDLAGNESSRSDVLNVTTKSEDSTYEKWDARKAYTKGDRVVYEGKVYEAVQDHQGNGDSNWIFALSLWKPVMNK

SEQ ID NO: 113 - DNA, 1368 bp, Bacillus cereus
atgaagaatcaatttttaaaacaactacaaaacatgaaaatgaacaaaaaaagtctaggagctgttgcattaacagctggaattattggcacgacacttattcctcaaaacgcatacgcgcacggttttgttgaaaagccgagcagccgatctgctttatgtagtccaacttatggtgcactaaatgtaaactgcggaagtgttatgtatgaaccacaaagtttggaagctccaaaagggttcccgcaaactggcccagttgatggtcaaatcgcttctgcaggtggtaagtttggtggtattttagatcaacaaactgccgatcgttggtttaaaaatacaattacaggcggggaaaatacatttacgtggaaatatacagcgcctcacttaacgagcaaatggcattactatattacaaaaaaaggatggaatccaaataaagcgctcacaagagcagattttgaaccaattggaactgtgcaacatgatggttctgcagcctcaaatcatttaactcacaaaatcaatgtacctactgatagaagtgggtatcatgtaattttagcagtatgggatgtagctgatacagcaaatgcattctataatgtaattgatgttaatctcatcaatgacgtaaaaccagacacagaagctccaagcattccaaatagaattcaggcacaaaaagtaacagcgaatagtatagaactagcatggaacgattctacggataatgtaggggtaaaagggtatcaaatcttccgtaacggagagatgattgatacagtaccaggaactcattttattgataaaaaattacaaccaagtacagaatactcttatactataaaagcaattgacgcagctggaaatgtatcgaaagaaagtgcaacgcttacagtgaaaacaacagttgaggctcctgatacagaagcaccaacacaaccaaaaggattacatagtatgggaacgacagcgtcaagtgtggatctaatgtggagtccttctgacgataatattggtgtagaccattacgatatttatagagaaacaaaaggatcgatggaaaaaattgcaacatccaatacgacttcttatatggataaatatttactctctaatactacttataaatatgtagtgaaagctgttgatgtagctggaaatgaatctgtacagagtgatatattcataattactacaaaaactgaaagcgtttcatatgaagaatgggatgcaaagaaagcatatgaaaagggagataaagttctacacgagggaaaagtatatgaagcagtccaaagttataaaggaaatggggatccaaactggatttatgctttatcattatggaaaacagtgtaa

SEQ ID NO: 114 - protein, 455 aa, Bacillus cereus
MKNQFLKQLQNMKMNKKSLGAVALTAGIIGTTLIPQNAYAHGFVEKPSSRSALCSPTYGALNVNCGSVMYEPQSLEAPKGFPQTGPVDGQIASAGGKFGGILDQQTADRWFKNTITGGENTFTWKYTAPHLTSKWHYYITKKGWNPNKALTRADFEPIGTVQHDGSAASNHLTHKINVPTDRSGYHVILAVWDVADTANAFYNVIDVNLINDVKPDTEAPSIPNRIQAQKVTANSIELAWNDSTDNVGVKGYQIFRNGEMIDTVPGTHFIDKKLQPSTEYSYTIKAIDAAGNVSKESATLTVKTTVEAPDTEAPTQPKGLHSMGTTASSVDLMWSPSDDNIGVDHYDIYRETKGSMEKIATSNTTSYMDKYLLSNTTYKYVVKAVDVAGNESVQSDIFIITTKTESVSYEEWDAKKAYEKGDKVLHEGKVYEAVQSYKGNGDPNWIYALSLWKTV

SEQ ID NO: 115 - DNA, 1368 bp, Bacillus cereus
atgaataatcgattattaaaacaactacaaaacatgaaaatgaacaaaaaaagtctaggagctgttgcattaacagctggaattattggtacgacgcttattcctcaaaacacatatgcgcatggttttgttgaaaaacctggcagtcgatctgctttatgtagtccaacttatggtgcactaaatgtaaattgcggaagtgttatgtatgaaccgcaaagcttagaagcaccaaaaggattcccgcaaggtggcccagttgatggacaaatcgcttctgcaggcggaaaatttggtggtattttagatcaacaaacagccgatcgttggtttaaaaatacaattacaggcggggaaaatacatttacgtggaaatatacagcgcctcacttaacgagcaaatggcattactatattacaaaaaaaggatgggatccaaataaagcgctcacaagagcagatttagaaccaattggaactgtacaacatgatggctctgcagcctcaaatcatttaactcacaaaattaatgtacctactgatagaagtggatatcatgtaattttagcagtatgggatgtagctgatactgcaaatgcattctataatgtaattgatgttaatctcatcaatgacgtaaaaccagacacagaagctccaagcattccaaatagaattcaggcacaaaaagtaacagcgaatagtatagaactagcatggaacgcttctacggataatgtaggggtaaaagggtatcaaatcttccgtaacggagagatgattgatacagtaacaggacctcattttattgataaaaaattacaaccaagtacagaatactcttatactgtaaaagcaattgacgcagctggaaatgtatcgaaagaaagtgcaacgcttacagtgaaaacaacagttgaggctcctgatacagaagcaccaacacaaccaaaaggattacatagtatgggaacgacagcgtcaagtgtggatctaatgtggagtccttctgacgataatattggtatagaccattacgatatttatagagaaacagaaggatcgatgaaaaagattgcaacatccaatacgacttcttatatggataaatatttactctctaatactacttataaatatgtagtgaaagctattgatgtagctggaaatgaatctatacagagtgatatattcacaattactacaaaaactgaaagcgcttcatatggagagtgggatgcaaagaaagcatatgaaaagggagatagagttctacacgagggaaaagtatatgaagcagtccaaagttataaaggaaatggggatccaaactggatttatgccttatcattatggaaaacagtgtaa

SEQ ID NO: 116 - protein, 455 aa, Bacillus cereus
MNNRLLKQLQNMKMNKKSLGAVALTAGIIGTTLIPQNTYAHGFVEKPGSRSALCSPTYGALNVNCGSVMYEPQSLEAPKGFPQGGPVDGQIASAGGKFGGILDQQTADRWFKNTITGGENTFTWKYTAPHLTSKWHYYITKKGWDPNKALTRADLEPIGTVQHDGSAASNHLTHKINVPTDRSGYHVILAVWDVADTANAFYNVIDVNLINDVKPDTEAPSIPNRIQAQKVTANSIELAWNASTDNVGVKGYQIFRNGEMIDTVTGPHFIDKKLQPSTEYSYTVKAIDAAGNVSKESATLTVKTTVEAPDTEAPTQPKGLHSMGTTASSVDLMWSPSDDNIGIDHYDIYRETEGSMKKIATSNTTSYMDKYLLSNTTYKYVVKAIDVAGNESIQSDIFTITTKTESASYGEWDAKKAYEKGDRVLHEGKVYEAVQSYKGNGDPNWIYALSLWKTV

SEQ ID NO: 117 - DNA, 1368 bp, Bacillus thuringiensis
atgaataatcgattattaaaacaactacaaaacatgaaaatgaacaagaaaagtctaggagctgttgcattaacagccggaattattggtacgacgcttattcctcaaaacacatatgcgcatggttttgttgaaaaacctggcagtcgatctgctttatgtagtccaacttatggtgcattaaatgtaaattgtggaagtgttatgtatgaaccgcaaagcttagaagcaccaaaaggattcccgcaaggtggcccagttgatggacaaatcgcttctgcaggcggaaaatttggtggtattttagatcaacaaacagccgatcgttggtttaaaaatacaattacaggcggggaaaatacatttacgtggaaatatacagcgcctcacttaacgagcaaatggcattactatattacaaaaaaaggatgggatccaaataaagcgctcacaagagcagatttagaaccaattggaactgtacaacatgatggctctgcagcctcaaatcatttaactcacaaaattaatgtacctactgatagaagtggatatcatgtgattttagcggtatgggatgtagctgatacagcaaatgcattctataatgttattgatgttaatctcatcaatgacgtaaaaccagacacagaagctccaagcattccaaatagaattcaggcacaaaaagtaacagcgaatagtatagaactagcatggaacgcttctacggataatgtaggggtaaaagggtatcaaatcttccgtaacggagagatgattgatacagtaacaggacctcattttattgataaaaaattacaaccaagtacagaatactcttatactgtaaaagcaattgacgcagctggaaatgtatcgaaagaaagtgcaacgcttacagtgaaaacaacagttgaggctcctgatacagaagcaccaacacaaccaaaaggattacatagtatgggaacgacagcgtcaagtgtggatctaatgtggagtccttctgacgataatattggtatagaccattacgatatttatagagaaacagaaggatcgatgaaaaagattgcaacatccaatacgacttcttatatggataaatatttactctctaatactacttataaatatgtagtgaaagctattgatgtagctggaaatgaatctatacagagtgatatattcacaattactacaaaaactgaaaacgcttcatatggagagtgggatgcaaagaaagcatatgaaaagggagatagagttctacacgagggaaaagtatatgaagcagtccaaagttataaaggaaatggggatccaaactggatttatgccttatcattatggaaaacagtgtaa

SEQ ID NO: 118 - protein, 455 aa, Bacillus thuringiensis
MNNRLLKQLQNMKMNKKSLGAVALTAGIIGTTLIPQNTYAHGFVEKPGSRSALCSPTYGALNVNCGSVMYEPQSLEAPKGFPQGGPVDGQIASAGGKFGGILDQQTADRWFKNTITGGENTFTWKYTAPHLTSKWHYYITKKGWDPNKALTRADLEPIGTVQHDGSAASNHLTHKINVPTDRSGYHVILAVWDVADTANAFYNVIDVNLINDVKPDTEAPSIPNRIQAQKVTANSIELAWNASTDNVGVKGYQIFRNGEMIDTVTGPHFIDKKLQPSTEYSYTVKAIDAAGNVSKESATLTVKTTVEAPDTEAPTQPKGLHSMGTTASSVDLMWSPSDDNIGIDHYDIYRETEGSMKKIATSNTTSYMDKYLLSNTTYKYVVKAIDVAGNESIQSDIFTITTKTENASYGEWDAKKAYEKGDRVLHEGKVYEAVQSYKGNGDPNWIYALSLWKTV

SEQ ID NO: 119 - DNA, 1368 bp, Bacillus thuringiensis
atgaagaatcgatttttaaaacaactacaaaacatgaaaatgaacaaaaaaagtctaggagctgttgcgttaacagctggaattattggcacaacacttattcctcaaaacgcatacgcgcacggttttgttgaaaaacctggcagccgatctgctttatgtagtccaacctatggtgcactaaatgtaaattgcggaagtgttatgtatgaaccgcaaagtttagaagctccaaaaggcttcccgcaaggtggcccagttgatggacaaatcgcttctgcaggtggtaaatttggtggtgtgttagatcaacaaacagcaaatcgttggtttaaaaatacaatcactgttggagaaaatacatttacttggaagtatacagcgcctcatttaacgagcaaatggcattactatattacaaaaaaaggatggaatccaaataaagcgctcacaagagcagattttgaaccgattggaactgtacaacatgatggttctgcagcctcaaatcatttaactcacaaaatcaatgtacctactgatcgtagtggatatcatgtgattttagcagtatgggatgtagccgatacagcaaatgcattctataatgttattgatgttaatctcatcaatgacgtaaaaccagatacagaggctccaagtattccaaatggaattcaggcccaaaaagtaacagcgcatagtattgaactagcatggaccgcttctacggataatgtaggggtaaaaggatatcaaatcttccgtaacggagagatgatcgacacagtaccgggcactcattttattgataaaaaattacaaccaagcacggaatattcttatactgtaaaagcgattgacgcagctggaaatgcttcgaaagaaagtgcaaagcttacagtaaaaacgacagttgaggctcccgatacagaagcaccaacacaaccaaaaggattacatagtatgggaacaacaacgtcaagtgtggatttaatgtggagtccttccgacgataatattggtgtagaccattacgatatttatagagaaacagaaggatcgatgaaaaagattgcaacatccaatacgactgcttatatcgataaaaatttactccctaatactacttataaatatgtagtgaaagctgttgatgtagctggaaatgaatctgtacagagtgatatattcacaattactacaaaaactgaaagcgcttcatacgaagagtgggatgcaacgaaagcatatgaaaaaggagatagagttctatacgagggaaaagtatatgaagcagtgcagagttataaaggaaatggggatccaaactggatttatgctttgtcattatggaaaacagtataa

SEQ ID NO: 120 - protein, 455 aa, Bacillus thuringiensis
MKNRFLKQLQNMKMNKKSLGAVALTAGIIGTTLIPQNAYAHGFVEKPGSRSALCSPTYGALNVNCGSVMYEPQSLEAPKGFPQGGPVDGQIASAGGKFGGVLDQQTANRWFKNTITVGENTFTWKYTAPHLTSKWHYYITKKGWNPNKALTRADFEPIGTVQHDGSAASNHLTHKINVPTDRSGYHVILAVWDVADTANAFYNVIDVNLINDVKPDTEAPSIPNGIQAQKVTAHSIELAWTASTDNVGVKGYQIFRNGEMIDTVPGTHFIDKKLQPSTEYSYTVKAIDAAGNASKESAKLTVKTTVEAPDTEAPTQPKGLHSMGTTTSSVDLMWSPSDDNIGVDHYDIYRETEGSMKKIATSNTTAYIDKNLLPNTTYKYVVKAVDVAGNESVQSDIFTITTKTESASYEEWDATKAYEKGDRVLYEGKVYEAVQSYKGNGDPNWIYALSLWKTV

SEQ ID NO: 121 - DNA, 1368 bp, Bacillus cereus
atgaagaatcaatttttaaaacaactacaaaacatgaaaatgaacaaaaaaagtctaggagctgttgcattaacagctggaattattggcacgacacttattcctcaaaacgcatacgcgcacggttttgttgaaaagccgagcagccgatctgctttatgtagtccaacttatggtgcactaaatgtaaactgcggaagtgttatgtatgaaccacaaagtttggaagctccaaaagggttcccgcaaactggcccagttgatggtcaaatcgcttctgcaggtggtaagtttggtggtattttagatcaacaaactgccgatcgttggtttaaaaatacaattacaggcggggaaaatacatttacgtggaaatatacagcgcctcacttaacgagcaaatggcattactatattacaaaaaaaggatggaatccaaataaagcgctcacaagagcagattttgaaccaattggaactgtgcaacatgatggttctgcagcctcaaatcatttaactcacaaaatcaatgtacctactgatagaagtgggtatcatgtaattttagcagtatgggatgtagctgatacagcaaatgcattctataatgtaattgatgttaatctcatcaatgacgtaaaaccagacacagaagctccaagcattccaaatagaattcaggcacaaaaagtaacagcgaatagtatagaactagcatggaccgcttctacggataatgtaggggtaaaagggtatcaaatcttccgtaacggagagatgattgatacagtaccaggaactcattttattgataaaaaattacaaccaagtacagaatactcttatactataaaagcaattgacgcagctggaaatgtatcgaaagaaagtgcaacgcttacagtgaaaacaacagttgaggctcctgatacagaagcaccaacacaaccaaaaggattacatagtatgggaacgacagcgtcaagtgtggatctaatgtggagtccttctgacgataatattggtgtagaccattacgatatttatagagaaacaaaaggatcaatggaaaaaattgcaacatccaatacgacttcttatatggataaatatttactctctaatactacttataaatatgtagtgaaagctgttgatgtagctggaaatgaatctgtacagagtgatatattcataattactacaaaaactgaaagcgtttcatatgaagaatgggatgcaaagaaagcatatgaaaagggagataaagttctacacgagggaaaagtatatgaagcagtccaaagttataaaggaaatggggatccaaactggatttatgccttatcattatggaaaacagtgtaa

SEQ ID NO: 122 - protein, 455 aa, Bacillus cereus
MKNQFLKQLQNMKMNKKSLGAVALTAGIIGTTLIPQNAYAHGFVEKPSSRSALCSPTYGALNVNCGSVMYEPQSLEAPKGFPQTGPVDGQIASAGGKFGGILDQQTADRWFKNTITGGENTFTWKYTAPHLTSKWHYYITKKGWNPNKALTRADFEPIGTVQHDGSAASNHLTHKINVPTDRSGYHVILAVWDVADTANAFYNVIDVNLINDVKPDTEAPSIPNRIQAQKVTANSIELAWTASTDNVGVKGYQIFRNGEMIDTVPGTHFIDKKLQPSTEYSYTIKAIDAAGNVSKESATLTVKTTVEAPDTEAPTQPKGLHSMGTTASSVDLMWSPSDDNIGVDHYDIYRETKGSMEKIATSNTTSYMDKYLLSNTTYKYVVKAVDVAGNESVQSDIFIITTKTESVSYEEWDAKKAYEKGDKVLHEGKVYEAVQSYKGNGDPNWIYALSLWKTV

SEQ ID NO: 123 - DNA, 1377 bp, Bacillus cereus
atgaatttgaaattaacatctaagttagaaagattaagaaaaagtaaaaaaggaattggtgcttgtgttttagctgtaggggtgacggcaattacaatgattcctcaaagtgcatatgcacatgggtttgttgaaaagccgagtagtcgtgctgctttatgtagtcagaattatggagcattaaatttaaattgtggaaatgtaatgtacgaacctcaaagtctagaagcacctaaaggattcccagatggtggaccgattgatgggaaaatcgcttcggcaggaggactgtttggagggattcttgaccaacaaacatcaaatcgctggttcaaaaacacaataaaggggggagcaaatacatttacatggaaatacacagcggcacattctacaagtaaatggcattattacattaccaaaaagggatgggatcctaataaaccattaacacgtgctgaattagaaccaattggaactgtgaaacatgatggttcggcagcatcaaataatttaacacatacaattaatgtaccaactgatcgcaatggttatcatgttattttagctgtatgggatgtagcagatacgtcaaatgcgttttataatgtaattgatgtaaatctagtaaataatgaagctcccgatacagtagctccaagtcaaccaactggattaaatgcgtctaaagtttctgccaatagtgttgaactaacatggaaggcctcaaatgataatataggcgtaaaagaatatcaagtgttacgtaatggagaagtaattggtacggtaccaggtacaacttttactgataaaaaactaaaagcaaatacggaatatacctatacaataaaggcattagacgctgctggaaacatatcaaaagaaagtgaaaaactaaaggttaagacaacaaatgaaactccagataaagaggctccgactcaaccaaaaggattacatagtatgggtacaacagcgacaactgttgatttgatgtggagtgcgtctgaagataatgtaggtgttgatcattatgttgtatatagagaaagcactggggttatgaataaaattgggacagcggataatacatcctttatggataaagatttaaaaactaatacatcgtataaatatgtagtgacggcggttgatttagctggaaatgagtctagtagaagtgatgttttaactgtagcaaccaaactagaggactctacttatgaaaaatgggatgcaagaaaagcatacaataaaggtgataaagtagtacatgagggaaaagtgtatgaagcgattcaaagttatcaagggaacggcgatccaaattggatttttgcactatcgctttggaagccagttttaaataaatga

SEQ ID NO: 124 - protein, 458 aa, Bacillus cereus
MNLKLTSKLERLRKSKKGIGACVLAVGVTAITMIPQSAYAHGFVEKPSSRAALCSQNYGALNLNCGNVMYEPQSLEAPKGFPDGGPIDGKIASAGGLFGGILDQQTSNRWFKNTIKGGANTFTWKYTAAHSTSKWHYYITKKGWDPNKPLTRAELEPIGTVKHDGSAASNNLTHTINVPTDRNGYHVILAVWDVADTSNAFYNVIDVNLVNNEAPDTVAPSQPTGLNASKVSANSVELTWKASNDNIGVKEYQVLRNGEVIGTVPGTTFTDKKLKANTEYTYTIKALDAAGNISKESEKLKVKTTNETPDKEAPTQPKGLHSMGTTATTVDLMWSASEDNVGVDHYVVYRESTGVMNKIGTADNTSFMDKDLKTNTSYKYVVTAVDLAGNESSRSDVLTVATKLEDSTYEKWDARKAYNKGDKVVHEGKVYEAIQSYQGNGDPNWIFALSLWKPVLNK

SEQ ID NO: 125 - DNA, 1377 bp, Bacillus cereus
atgaatttgaaattaacatctaaattggaaagattaagaaaaagtaaaaaaggaattggtgcttgtgttttagctgcaggggtaacggctattactatgattcctcaaagtgcttatgcacatggatttgttgaaaagccaagtagccgtgctgctttatgtagtcagaattatggagcactgaatttaaattgtggaaatataatgtacgaacctcaaagcctagaagcacctaaaggattcccagatgggggaccgattgatggaaaaatcgcttcggcagggggactgtttggaggaattctggaccaacaaacatcaaatcgctggttcaaaaacacgattaagggtggagcaaatacctttacatggaaatatacagctgcacatcctacaagtaaatggcattattacattacaaaaaagggatgggatcctaataaaccattaacacgtgctgaattagaaccaattggaactgtgaaacatgatggttctgccgcatcaaataatttaacacatacaattaatgtaccaactgatcgcaatggttatcatgttattttagctgtatgggatgtagcagatacgtcaaatgcgttttataatgtaattgatgtaaatctagtaaataatgaaactcccgatacagtagctccaagtcaaccaactgaattaaatgcctctaaagtttctgccaatagtgttgaaataacatggaaggcttctacggataatataggtgtaaaggaatatcaagtgttacgtaatggcgaagtaattgatacggtaccaggtacaacttttattgataaaaaactaaaagcagatacggaatatacctatacaataaaggcattagactctgctggaaacatatcaaaagaaagtgaaaaactaaaggttaagacaacacatgcaatcccagatatagaggctccaactcaaccaaaaggattacatagtatgggtacaacagcgacaactgttgatttgatgtggagtccgtctgaagataatgtaggtgttgaccattatattgtatatagagaaagcgctggggttatgaataaaattgggacagcggctaatacatcctttatggataaagatttgaaggctaatacatcgtataaatatgtagtgacggcggttgatttagctggaaatgaatctagtagaagtgatgttttgactgtaacaacaaagtcagaggattccacatatgaaaaatgggatgcaagaaaagcatatactaaaggcgatagagtagtacatgagggaaaagtgtatgaagcagttcaagatcatcaaggaaatggcgactcaaattggatttttgccttatcgctttggaagccagttttgaataagtga

SEQ ID NO: 126 - protein, 458 aa, Bacillus cereus
MNLKLTSKLERLRKSKKGIGACVLAAGVTAITMIPQSAYAHGFVEKPSSRAALCSQNYGALNLNCGNIMYEPQSLEAPKGFPDGGPIDGKIASAGGLFGGILDQQTSNRWFKNTIKGGANTFTWKYTAAHPTSKWHYYITKKGWDPNKPLTRAELEPIGTVKHDGSAASNNLTHTINVPTDRNGYHVILAVWDVADTSNAFYNVIDVNLVNNETPDTVAPSQPTELNASKVSANSVEITWKASTDNIGVKEYQVLRNGEVIDTVPGTTFIDKKLKADTEYTYTIKALDSAGNISKESEKLKVKTTHAIPDIEAPTQPKGLHSMGTTATTVDLMWSPSEDNVGVDHYIVYRESAGVMNKIGTAANTSFMDKDLKANTSYKYVVTAVDLAGNESSRSDVLTVTTKSEDSTYEKWDARKAYTKGDRVVHEGKVYEAVQDHQGNGDSNWIFALSLWKPVLNK

SEQ ID NO: 127 - DNA, 1377 bp, Bacillus cereus
atgaatttgaaatttacatctaaattggaaagattaagaaaaagtaaaaaaggaattggtgcttgtgttttagctgcaggggtaacggctattactatgattcctcaaagtgcttatgcacatggatttgttgaaaagccaagtagccgtgctgctttatgtagtcagaattatggagcattgaatttaaattgtggaaatataatgtacgaacctcaaagcctagaagcacctaaaggattcccagatgggggaccgattgatggaaaaatcgcttcggcaggaggactgtttggaggaattcttgaccaacaaacatcaaatcgctggttcaaaaacacgattaagggtggagcaaatacctttacatggaaatatacagctgcacatcctacaagtaaatggcattattacattacaaaaaagggatgggatcctaataaaccattaacacgtgctgaattagaaccaattggaactgtgaaacatgatggttctgccgcatcaaataatttaacacatacaattaatgtaccaactgatcgcaatggttatcatgttattttagctgtatgggatgtagcagatacgtcaaatgcgttttataatgtaattgatgtaaatctagtaaataatgaaactcccgatacagtagctccaagtcaaccaactgaattaaatgcctctaaagtttctgccaatagtgttgaaataacatggaaggcctctactgataatataggtgtaaaagaatatcaagtgttacgtaatggcgaagtaattgatacggtaccaggtacaacttttattgataaaaaactaaaagcagatacggaatatacctatacaataaaggcattagactctgctggaaacatatcaaaagaaagtgaaaaactaaaggttaagacaacacatgcaatcccagatatagaggctccaactcaaccaaaaggattacatagtatgggtacaacagcgacaactgttgatttgatgtggagtccgtctgaagataatgtaggtgttgaccattatattgtatatagagaaagcgctggggttatgaataaaattgggacagcggctaatacatcctttatggataaagatttgaaggctaatacatcgtataaatatgtagtgacggcggttgatttagctggaaatgaatctagtagaagtgatgttttgactgtaacaacaaagtcagaggattccacatatgaaaaatgggatgcaagaaaagcatatactaaaggcgatagagtagtacatgagggaaaagtgtatgaagcagttcaagatcatcaaggaaatggcgactcaaattggatttttgccttatcgctttggaagccagttttgaataagtga

SEQ ID NO: 128 - protein, 458 aa, Bacillus cereus
MNLKFTSKLERLRKSKKGIGACVLAAGVTAITMIPQSAYAHGFVEKPSSRAALCSQNYGALNLNCGNIMYEPQSLEAPKGFPDGGPIDGKIASAGGLFGGILDQQTSNRWFKNTIKGGANTFTWKYTAAHPTSKWHYYITKKGWDPNKPLTRAELEPIGTVKHDGSAASNNLTHTINVPTDRNGYHVILAVWDVADTSNAFYNVIDVNLVNNETPDTVAPSQPTELNASKVSANSVEITWKASTDNIGVKEYQVLRNGEVIDTVPGTTFIDKKLKADTEYTYTIKALDSAGNISKESEKLKVKTTHAIPDIEAPTQPKGLHSMGTTATTVDLMWSPSEDNVGVDHYIVYRESAGVMNKIGTAANTSFMDKDLKANTSYKYVVTAVDLAGNESSRSDVLTVTTKSEDSTYEKWDARKAYTKGDRVVHEGKVYEAVQDHQGNGDSNWIFALSLWKPVLNK

SEQ ID NO: 129 - DNA, 1368 bp, Bacillus anthracis
atgaataatcgattattaaaacaactacaaaacatgaaaatgaacaagaaaagtctaggagctgttgcattaacagccggaattattggtacgacgcttattcctcaaaacacatatgcgcatggttttgttgaaaaacctggcagtcgatctgctttatgtagtccaacttatggtgcattaaatgtaaattgcggaagtgttatgtatgaaccacaaagtctggaagctccaaaaggcttcccacaagggggcccagttgatggacaaatcgcttctgcaggtggtaaatttggtggtattttagatcaacaaacagccgatcgttggtttaaaaatacaatcactggtggagaaaatacatttacttggaagtatacagcgcctcacttaacgagtaaatggcattactatattacaaaaaaaggatggaatccaaataaagcgctcacaagagctgattttgaaccgattggaactgtacaacatgatggttctgcagcctcaaatcatttaactcacaaaattaatgtacctactgatagaagtggatatcatgtgattttagcagtatgggatgtagctgatacagcaaatgcattctataatgttattgatgttactctcatcaatgacgtaaaaccagatacagaagctccaagtattccaaatggaattcaggcacaaaaagtaacagcgaatagtattgaactagcatggaccgcttctacggataatgtaggggtaaaaggatatcaaatcttccgtaacggagagatgatcgacacagtaccgggcactcattttattgataaaaaattacaaccaagcacggaatattcttatactgtaaaagcgattgacgcagctggaaatgcttcgaaagaaagtgcaaagcttacagtaaaaacgacagttgaggctcctgatacagaagcaccaacacaaccaaaaggattacatagtatgggaacaacaacgtcaagtgtggatctaatgtggagtccttccgacgataatattggtgtaggccattacgatatttatagagaaacagaaggatcgatgaaaaagattgcaacatccaatacgacttcttatatggataaaaatttactccctaatactacttataaatatgtagtaaaagctgtcgatgtagctggaaatgaatctgtacagagtgatatattcacaattactacaaaaactgaaggcgtttcatacgaagagtgggatgcaaagaaagcatatgaaaagggagataaagttctacacgagggaaaagtatatgaagcagtccaaagttataaaggaaatggggatccaaactggatttatgccttatcattatggaaaacagtgtaa

SEQ ID NO: 130 - protein, 455 aa, Bacillus anthracis
MNNRLLKQLQNMKMNKKSLGAVALTAGIIGTTLIPQNTYAHGFVEKPGSRSALCSPTYGALNVNCGSVMYEPQSLEAPKGFPQGGPVDGQIASAGGKFGGILDQQTADRWFKNTITGGENTFTWKYTAPHLTSKWHYYITKKGWNPNKALTRADFEPIGTVQHDGSAASNHLTHKINVPTDRSGYHVILAVWDVADTANAFYNVIDVTLINDVKPDTEAPSIPNGIQAQKVTANSIELAWTASTDNVGVKGYQIFRNGEMIDTVPGTHFIDKKLQPSTEYSYTVKAIDAAGNASKESAKLTVKTTVEAPDTEAPTQPKGLHSMGTTTSSVDLMWSPSDDNIGVGHYDIYRETEGSMKKIATSNTTSYMDKNLLPNTTYKYVVKAVDVAGNESVQSDIFTITTKTEGVSYEEWDAKKAYEKGDKVLHEGKVYEAVQSYKGNGDPNWIYALSLWKTV

SEQ ID NO: 131 - DNA, 1368 bp, Bacillus cereus
atgaataatcgaattttaaaacatctacagaacatgaaaatgaacaaaaaaagtctaggagctgttgtattaacagctggaattatcggcacgacacttattcctcaaaatgcttacgcgcacggttttgttgaaaagcctggtagccgttccgctttatgtagtccaacttatggtgcactaaatgtaaactgtggaagtgttatgtatgaaccacaaagcttagaagcaccaaaaggattcccgcaagctggcccagttgatggacaaatcgcttctgcaggcggaaaatttggtggtattttggatcaacaaacagcagatcgttggtttaaaaatacaatcactggcggagaaaatacgtttacttggaagtttacagcgccacatttaacaagcaaatggcactattacattactaaaataggctggaatccaaataaagcgctaacaagagcggattttgagccaattggaactgtacaacatgatggttccgcagcttcaaataatgtagcacacaaaatcaatgtacctacggatcgtaatggctaccatgtgattttagctgtatgggatgtagctgatacagcaaatgcgttctataatgtaattgatgtgaatctcatcaataatgtgaaaccagacacagaagctccaagtattccaaatggacttcaggcgcaaaaagtaacagcaaatagtatagaactaacatggaacacttctacggataatgtaggggtgaaaggatatcaagttttccgtaacggagagatgattgacactgtactaggcactcattttattaataaacaattaaaaccaagtacagaatacacttatactgtaaaagcaattgacgcagctggcaatctatcgaaagaaagtacagcgcttacagtgaaaacaacagttgaggctcctgatacagaagcaccaacacaaccaaaaggattacatagcatgggaacaacagcgtcaagtgtggatctaatgtggagcccatctgatgataacgttggagtagactattacgatatttatagagaaatagaaggaacaatgaaaaaaattgcaacatccaatacgacttcttatatggataaaaatttactcgctaatacgacttataaatatgcagtgaaagcagtggatgtagttggaaatgaatccgtacaaagtgatacgttcacaattactacaaaaactgaaagcgcttcatatgaagcgtgggatgcaaagaaagcatataaaaagggagatagagttttacacgagggaaaagtgtatgaagcagtccagaattatgaaggacatggggatccaaactggatttttgctttatccttatggaaaacagtgtaa

SEQ ID NO: 132 - protein, 455 aa, Bacillus cereus
MNNRILKHLQNMKMNKKSLGAVVLTAGIIGTTLIPQNAYAHGFVEKPGSRSALCSPTYGALNVNCGSVMYEPQSLEAPKGFPQAGPVDGQIASAGGKFGGILDQQTADRWFKNTITGGENTFTWKFTAPHLTSKWHYYITKIGWNPNKALTRADFEPIGTVQHDGSAASNNVAHKINVPTDRNGYHVILAVWDVADTANAFYNVIDVNLINNVKPDTEAPSIPNGLQAQKVTANSIELTWNTSTDNVGVKGYQVFRNGEMIDTVLGTHFINKQLKPSTEYTYTVKAIDAAGNLSKESTALTVKTTVEAPDTEAPTQPKGLHSMGTTASSVDLMWSPSDDNVGVDYYDIYREIEGTMKKIATSNTTSYMDKNLLANTTYKYAVKAVDVVGNESVQSDTFTITTKTESASYEAWDAKKAYKKGDRVLHEGKVYEAVQNYEGHGDPNWIFALSLWKTV

SEQ ID NO: 133 - DNA, 1353 bp, Bacillus cereus
ttggaaagattaagaaaaagtaaaaaaggaattggtgcttgtgttttagctgcaggggtaacggctattactatgattcctcaaagtgcttatgcacatggatttgttgaaaagccaagtagccgtgctgctttatgtagtcagaattatggagcattgaatttaaattgtggaaatataatgtacgaacctcaaagcctagaagcacctaaaggattcccagatgggggaccgattgatggaaaaatcgcttcggcaggaggactgtttggaggaattcttgaccaacaaacatcaaatcgctggttcaaaaacacgattaagggtggagcaaatacctttacatggaaatatacagctgcacatcctacaagtaaatggcattattacattacaaaaaagggatgggatcctaataaaccattaacacgtgctgaattagaaccaattggaactgtgaaacatgatggttctgccgcatcaaataatttaacacatacaattaatgtaccaactgatcgcaatggttatcatgttattttagctgtatgggatgtagcagatacgtcaaatgcgttttataatgtaattgatgtaaatctagtaaataatgaaactcccgatacagtagctccaagtcaaccaactgaattaaatgcctctaaagtttctgccaatagtgttgaaataacatggaaggcctctactgataatataggtgtaaaagaatatcaagtgttacgtaatggcgaagtaattgatacggtaccaggtacaacttttattgataaaaaactaaaagcagatacggaatatacctatacaataaaggcattagactctgctggaaacatatcaaaagaaagtgaaaaactaaaggttaagacaacacatgcaatcccagatatagaggctccaactcaaccaaaaggattacatagtatgggtacaacagcgacaactgttgatttgatgtggagtccgtctgaagataatgtaggtgttgaccattatattgtatatagagaaagcgctggggttatgaataaaattgggacagcggctaatacatcctttatggataaagatttgaaggctaatacatcgtataaatatgtagtgacggcggttgatttagctggaaatgaatctagtagaagtgatgttttgactgtaacaacaaagtcagaggattccacatatgaaaaatgggatgcaagaaaagcatatactaaaggcgatagagtagtacatgagggaaaagtgtatgaagcagttcaagatcatcaaggaaatggcgactcaaattggatttttgccttatcgctttggaagccagttttgaataagtga

SEQ ID NO: 134 - protein, 450 aa, Bacillus cereus
MERLRKSKKGIGACVLAAGVTAITMIPQSAYAHGFVEKPSSRAALCSQNYGALNLNCGNIMYEPQSLEAPKGFPDGGPIDGKIASAGGLFGGILDQQTSNRWFKNTIKGGANTFTWKYTAAHPTSKWHYYITKKGWDPNKPLTRAELEPIGTVKHDGSAASNNLTHTINVPTDRNGYHVILAVWDVADTSNAFYNVIDVNLVNNETPDTVAPSQPTELNASKVSANSVEITWKASTDNIGVKEYQVLRNGEVIDTVPGTTFIDKKLKADTEYTYTIKALDSAGNISKESEKLKVKTTHAIPDIEAPTQPKGLHSMGTTATTVDLMWSPSEDNVGVDHYIVYRESAGVMNKIGTAANTSFMDKDLKANTSYKYVVTAVDLAGNESSRSDVLTVTTKSEDSTYEKWDARKAYTKGDRVVHEGKVYEAVQDHQGNGDSNWIFALSLWKPVLNK

SEQ ID NO: 135 - DNA, 1353 bp, Bacillus thuringiensis
ttggaaagattaagaaaaagtaaaaaaggaattggtgcttgtgttctggctgcaggggtaacggctattactatgattcctcaaagtgcttatgcacatggatttgttgaaaagccaagtagccgtgctgctttatgtagtcagaattatggagcattgaatttaaattgtggaaatataatgtacgaacctcaaagcctagaagcacctaaaggattcccagatgggggaccgattgatggaaaaatcgcttcggcaggaggactgtttggaggaattcttgaccaacaaacatcaaatcgctggttcaaaaacacgattaagggtggagcaaatacctttacatggaaatatacagctgcacatcctacaagtaaatggcattattacattacaaaaaagggatgggatcctaataaaccattaacacgtgctgaattagaaccaattggaactgtgaaacatgatggttctgccgcatcaaataatttaacacatacaattaatgtaccaactgatcgcaatggttatcatgttattttagctgtatgggatgtagcagatacgtcaaatgcgttttataatgtaattgatgtaaatctagtaaataatgaaactcccgatacagtagctccaagtcaaccaactgaattaaatgcctctaaagtttctgccaatagtgttgaaataacatggaaggcctctactgataatataggtgtaaaagaatatcaagtgttacgtaatggcgaagtaattgatacggtaccaggtacaacttttattgataaaaaactaaaagcagatacggaatatacctatacaataaaggcattagactctgctggaaacatatcaaaagaaagtgaaaaactaaaggttaagacaacacatgcaatcccagatatagaggctccaactcaaccaaaaggattacatagtatgggtacaacagcgacaactgttgatttgatgtggagtccgtctgaagataatgtaagtgttgaccattatattgtatatagagaaagcgctggggttatgaataaaattgggacagcggctaatacatcctttatggataaagatttgaaggctaatacatcgtataaatatgtagtgacggcggttgatttagctggaaatgaatctagtagaagtgatgttttgaatgtaacaacaaagtcagaggattccacatatgaaaaatgggatgcaagaaaagcatatactaaaggcgatagagtagtacatgagggaaaagtgtatgaagcagttcaagatcatcaaggaaatggcgactcaaattggatttttgccttatcgctttggaagccatttttgaataagtga

SEQ ID NO: 136 - protein, 450 aa, Bacillus thuringiensis
MERLRKSKKGIGACVLAAGVTAITMIPQSAYAHGFVEKPSSRAALCSQNYGALNLNCGNIMYEPQSLEAPKGFPDGGPIDGKIASAGGLFGGILDQQTSNRWFKNTIKGGANTFTWKYTAAHPTSKWHYYITKKGWDPNKPLTRAELEPIGTVKHDGSAASNNLTHTINVPTDRNGYHVILAVWDVADTSNAFYNVIDVNLVNNETPDTVAPSQPTELNASKVSANSVEITWKASTDNIGVKEYQVLRNGEVIDTVPGTTFIDKKLKADTEYTYTIKALDSAGNISKESEKLKVKTTHAIPDIEAPTQPKGLHSMGTTATTVDLMWSPSEDNVSVDHYIVYRESAGVMNKIGTAANTSFMDKDLKANTSYKYVVTAVDLAGNESSRSDVLNVTTKSEDSTYEKWDARKAYTKGDRVVHEGKVYEAVQDHQGNGDSNWIFALSLWKPFLNK

SEQ ID NO: 137 - DNA, 1353 bp, Bacillus cereus
ttggaaagattaagaaaaagtaaaaaaggaattggtgcttgtgttttagctgcaggggtaacggctattactatgattcctcaaagtgcttatgcacatggatttgttgaaaagccaagtagccgtgctgctttatgtagtcagaattatggagcattgaatttaaattgtggaaatataatgtacgaacctcaaagcctagaagcacctaaaggattcccagatgggggaccgattgatggaaaaatcgcttcggcaggaggactgtttggaggaattcttgaccaacaaacatcaaatcgctggttcaaaaacacgattaagggtggagcaaatacctttacatggaaatatacagctgcacatcctacaagtaaatggcattattacattacaaaaaagggatgggatcctaataaaccattaacacgtgctgaattagaaccaattggaactgtgaaacatgatggttctgccgcatcaaataatttaacacatacaattaatgtaccaactgatcgcaatggttatcatgttattttagctgtatgggatgtagcagatacgtcaaatgcgttttataatgtaattgatgtaaatctagtaaataatgaaactcccgatacagtagctccaagtcaaccaactgaattaaatgcctctaaagtttctgccaatagtgttgaaataacatggaaggcctctactgataatataggtgtaaaagaatatcaagtgttacgtaatggcgaagtaattgatacggtaccaggtacaacttttattgataaaaaactaaaagcaaatacggaatatacctatacaataaaggcattagactctgctggaaacatatcaaaagaaagtgaaaaactaaaggttaagacaacacatgcaatcccagatatagaggctccaactcagccaaaaggattacatagtatgggtacaacagcgacaactgttgatttgatgtggagtccgtctgaagataatgtaggtgttgaccattatattgtatatagagaaagcgctggggttatgaataaaattgggacagcggctaatacatcctttatggataaagatttgaaggctaatacatcgtataaatatgtagtgacggcggttgatttagctggaaatgaatctagtagaagtgatgttttgactgtaacaacaaagtcagaggattccacatatgaaaaatggaatgcaagaaaagcatatactaaaggcgatagagtagtacatgagggaaaagtgtatgaagcagttcaagatcatcaaggaaatggcgactcaaattggatttttgccttatcgctttggaagccagttttgaataagtga

SEQ ID NO: 138 - protein, 450 aa, Bacillus cereus
MERLRKSKKGIGACVLAAGVTAITMIPQSAYAHGFVEKPSSRAALCSQNYGALNLNCGNIMYEPQSLEAPKGFPDGGPIDGKIASAGGLFGGILDQQTSNRWFKNTIKGGANTFTWKYTAAHPTSKWHYYITKKGWDPNKPLTRAELEPIGTVKHDGSAASNNLTHTINVPTDRNGYHVILAVWDVADTSNAFYNVIDVNLVNNETPDTVAPSQPTELNASKVSANSVEITWKASTDNIGVKEYQVLRNGEVIDTVPGTTFIDKKLKANTEYTYTIKALDSAGNISKESEKLKVKTTHAIPDIEAPTQPKGLHSMGTTATTVDLMWSPSEDNVGVDHYIVYRESAGVMNKIGTAANTSFMDKDLKANTSYKYVVTAVDLAGNESSRSDVLTVTTKSEDSTYEKWNARKAYTKGDRVVHEGKVYEAVQDHQGNGDSNWIFALSLWKPVLNK

SEQ ID NO: 139 - DNA, 1377 bp, Bacillus weihenstephanensis
atgaatttgaaattaacatctaagttagaaagattaagaaaaagtaaaaaaggaattggtgcttgtgttttagctgtaggggtgacggcaattacaatgattcctcaaagtgcatatgcacatgggtttgttgaaaagccgagtagtcgtgctgctttatgtagtcagaattatggagcattaaatttaaattgtggaaatgtaatgtacgaacctcaaagtctagaagcacctaaaggattcccagatggtggaccgattgatgggaaaatcgcttcggcaggaggactgtttggagggattcttgaccaacaaacatcaaatcgctggttcaaaaacacaataaaggggggagcaaatacatttacatggaaatacacagcggcacattctacaagtaaatggcattattacattaccaaaaagggatgggatcctaataaaccattaacacgtgctgaattagaaccaattggaactgtgaaccatgacggttcggccgcatcaaataatttaacacatacaattaatgtaccaactgatcgaaatggttatcatgttattttagctgtatgggatgtagcagatacgtcaaatgcgttttataatgtaattgatgtaaatttagtaaataatgaaactcccgatacagtagctccaagtcaaccaactggattaaatgcgtctaaagtttctgccaatagtgttgcactaacatggaaggcctctactgataatataggtgtaaaagaatatcaagtgttacgcaatggagaagtaattgatacggtaccaggtacaacttttactgataaaaaactaaaagcaaatgcggaatatacctatactataaaggcattagactctgctggaaacatatcaaaagaaagtgaaaaactaaaggttaagacaacaaatgaaactccagatacagaagctccgactcaaccgaaaggattacatagtatgagtacaacagcgacaactgttgatttgatgtggagtccgtctgaagataatgtaggtgttgaccattatattgtatatagagaaagcgctggggttatgaataaaattggggcagctgataatacatcctttatggataaagatttgaagactaatacatcgtataagtatgtagtgacggcggttgatttagctggaaatgaatctagtagaagtgatgttttgaatgtaacgacaaagtcagaggattccacatatgaaaaatgggatgcaagaaaggcatatactaaaggtgatagagtagtacatgaaggaaaagtgtatgaagcggttcaaaatcatcaaggaaatggcgactcaaattggatttttgccctatcgctttggaagccagttttgaataaatga

SEQ ID NO: 140 - protein, 458 aa, Bacillus weihenstephanensis
MNLKLTSKLERLRKSKKGIGACVLAVGVTAITMIPQSAYAHGFVEKPSSRAALCSQNYGALNLNCGNVMYEPQSLEAPKGFPDGGPIDGKIASAGGLFGGILDQQTSNRWFKNTIKGGANTFTWKYTAAHSTSKWHYYITKKGWDPNKPLTRAELEPIGTVNHDGSAASNNLTHTINVPTDRNGYHVILAVWDVADTSNAFYNVIDVNLVNNETPDTVAPSQPTGLNASKVSANSVALTWKASTDNIGVKEYQVLRNGEVIDTVPGTTFTDKKLKANAEYTYTIKALDSAGNISKESEKLKVKTTNETPDTEAPTQPKGLHSMSTTATTVDLMWSPSEDNVGVDHYIVYRESAGVMNKIGAADNTSFMDKDLKTNTSYKYVVTAVDLAGNESSRSDVLNVTTKSEDSTYEKWDARKAYTKGDRVVHEGKVYEAVQNHQGNGDSNWIFALSLWKPVLNK

SEQ ID NO: 141 - DNA, 1380 bp, Bacillus cytotoxicus
atgaatacaaaactatcatctaagttcaaaaaactaagtaaaggaaaaaaaggaataagtgctaccatattagtagccggaattatgggaatgctcacaattcccgaaaatgtatatgcacacggattcgttgaaaaacctagtagtcgcgcagctttatgcagtcagaaatacgatgcactcaatttaaattgtggaaacgtaatgtatgaaccgcaaagtctagaagcaccgaaaggatttcctcaaggcggaccaattgatggtaaaattgcttctgcaggtggcctatttggcggtattctcgaccaacaaacagtagatcgttggtttaaaaacacgattacagggggaccaaatacatttacatggaaatatacagcgccacatgcaacaagtaaatggcactattatattactaaaaaaggatggaatccaaataaacctttaactcgtgctgattttgagccaattggtactgttgaacataatggttctgcggcatcaaataatatatctcatacaattaatgtacctacggatcgtaacggttatcatgtcattttagcggtttgggatgtagcggacactagtaatgctttttataatgtaatcgatgttaatttaatcaataatgacaatagtgataaacaaccgccaactaaaccacaaggattacatgtgctaaaagttactccccatagtattgggctgaaatgggatgctgcctcagataatataggcgtaaaagaatatcaagtattccgtaacggaaaatcaattggttccgtattcggaaccacatttacagatacaaaattacaaacgaatacagaatatgtatatacaataaaagcaatcgatgtagctggaaatatgtccgaagaaagtcagcctataacagtaaagaccatggaggaagttcctgatacagaagcaccgacgcaaccaactacccttcatgcaatggaggtaacaaattccagtgtaaatttaatgtggagtgcatccgaggataatgtagaagttgatcattacgtaatctatcgcgaggtagctggaggtaagccgattaaaattgggacaaccaacactacatcttttatagacaaaaacctacaagcaaatacaacctatacgtatacagtcactgcaattgatacagccgaaaatgaatctatggaaagtaataaattgactgtaactacaaaagagcaaagttcatcttttgcaaaatgggatccatacaaagcatatacaaaaggcgataaagtagaataccaaggcaaattatatgaagctgttcaaagttaccaaggtaatggagatccaaattggatatttgctttatcattatggaaaccacttgagacaaagtaa

SEQ ID NO: 142 - protein, 459 aa, Bacillus cytotoxicus
MNTKLSSKFKKLSKGKKGISATILVAGIMGMLTIPENVYAHGFVEKPSSRAALCSQKYDALNLNCGNVMYEPQSLEAPKGFPQGGPIDGKIASAGGLFGGILDQQTVDRWFKNTITGGPNTFTWKYTAPHATSKWHYYITKKGWNPNKPLTRADFEPIGTVEHNGSAASNNISHTINVPTDRNGYHVILAVWDVADTSNAFYNVIDVNLINNDNSDKQPPTKPQGLHVLKVTPHSIGLKWDAASDNIGVKEYQVFRNGKSIGSVFGTTFTDTKLQTNTEYVYTIKAIDVAGNMSEESQPITVKTMEEVPDTEAPTQPTTLHAMEVTNSSVNLMWSASEDNVEVDHYVIYREVAGGKPIKIGTTNTTSFIDKNLQANTTYTYTVTAIDTAENESMESNKLTVTTKEQSSSFAKWDPYKAYTKGDKVEYQGKLYEAVQSYQGNGDPNWIFALSLWKPLETK

SEQ ID NO: 143 - DNA, 1377 bp, Bacillus cereus
atgaatttgaaattaacatctaagttagaaagattaagaaaaagtaaaaaaggaattggtgcttgtgttttagctgcaggggtgacggcaattacaatgattcctcaaagtgcatatgcacatgggtttgttgcaaagccgagtagtcgtgctgctttatgtagtcagaattatggagcattaaatttaaattgtggaaatgtaatgtacgaacctcaaagtctagaagcacctaaaggattcccagatggtggaccgattgatgggaaaatcgcttcagcaggaggactgtttggagggattcttgaccaacaaacatcaaatcgctggttcaaaaacacaataaaggggggagcaaatacatttacatggaaatacacagcggcacattctacaagtaaatggcattattacattaccaaaaagggatgggatcctaataaaccattaacacgtgctgaattagaaccaattggaactgtgaaccatgacggttcggccgcatcaaataatttaacacatacaattaatgtaccaactgatcgaaatggttatcatgttattttagctgtatgggatgtagcagatacgtcaaatgcgttttataatgtaattgatgtaaatttagtaaataatgaaactcccgatacagtagctccaagtcaaccaactggattaaatgcgtctaaagtttctgccaatagtgttgcactaacatggaaggcctctactgataatataggtgtaaaagaatatcaagtgttacgcaatggagaagtaattgatacggtaccaggtacaacttttactgataaaaaactaaaagcaaatgcggaatatacctatactataaaggcattagactctgctggaaacatatcaaaagaaagtgaaaaactaaaggttaagacaacaaatgaaactccagatacagaagctccgactcaaccgaaaggattacatagtatgagtacaacagcgacaactgttgatttgatgtggagtccgtctgaagataatgtaggtgttgaccattatattgtatatagagaaagcgctggggttatgaataaaattggggcagctgataatacatcctttatggataaagatttgaagactaatacatcgtataagtatgtagtgacggcggttgatttagctggaaatgaatctagtagaagtgatgttttgaatgtaacgacaaagtcagaggattccacatatgaaaaatgggatgcaagaaaggcatatactaaaggtgatagagtagtacatgaaggaaaagtgtatgaagcggttcaaaatcatcaaggaaatggcgactcaaattggatttttgccctatcgctttggaagccagttttgaataaatga

SEQ ID NO: 144 - protein, 458 aa, Bacillus cereus
MNLKLTSKLERLRKSKKGIGACVLAAGVTAITMIPQSAYAHGFVAKPSSRAALCSQNYGALNLNCGNVMYEPQSLEAPKGFPDGGPIDGKIASAGGLFGGILDQQTSNRWFKNTIKGGANTFTWKYTAAHSTSKWHYYITKKGWDPNKPLTRAELEPIGTVNHDGSAASNNLTHTINVPTDRNGYHVILAVWDVADTSNAFYNVIDVNLVNNETPDTVAPSQPTGLNASKVSANSVALTWKASTDNIGVKEYQVLRNGEVIDTVPGTTFTDKKLKANAEYTYTIKALDSAGNISKESEKLKVKTTNETPDTEAPTQPKGLHSMSTTATTVDLMWSPSEDNVGVDHYIVYRESAGVMNKIGAADNTSFMDKDLKTNTSYKYVVTAVDLAGNESSRSDVLNVTTKSEDSTYEKWDARKAYTKGDRVVHEGKVYEAVQNHQGNGDSNWIFALSLWKPVLNK

SEQ ID NO: 145 - DNA, 1377 bp, Bacillus cereus
atgaatttgaaattaacatctaaattagaaaaattaagaaaaagtaaaaaaggaattggtgcttgtgttttagctgcaggggtggcggcaattacaatgattcctcaaagtacatatgcacatgggtttgttgaaaaaccaagtagtcgtgctgctttatgtagtcagaattatggagcattaaatttaaattgtggaaatgtaatgtacgaacctcaaagtctagaagcgcctaaaggatttccagagggtggaccgattaatgggaaaatcgcttcggcaggaggactgtttggagggattcttgaccaacaaacatcaaatcgttggttcaaaaacacaataaaggggggagcaaatacatttacatggaaatacacagcggcgcattctacaagtaaatggcattattacattacaaaaaagggatgggatcctaataaaccattaacacgtgctgatttagaaccaattggaactgtgaaacatgatggttcggccgcatcaaataatgtaacacatacaattaatgtaccaactgatcgaaatggttatcatgttattttagctgtatgggatgtagcagatacgtcaaatgcgttttataatgtaattgatgtgaatttagtaaataatgaaactcccgatacagtagctccaagtcaaccaactggattaaatgcgtctaaggtttctgccaatagtgttgcactaacatggaaggcctctactgataatataggtgtaaaagaatatcaagtgttacgcaatggagaagtaattgatacggtaccaggtacaacttttattgataaaaaactaaaagcaaatacggaatatacctatacaataaaggcattagactctgctggaaacatatcaaaagaaagtgaaaaactaaaagttaagacaacaaatggaatcccagatatagaggctccgactcaacctaaaggattacatagtatgggtacaacagcgacaactgttgatttgatgtggagtccgtctgaagataatgtaggtgttgaccattatgttgtatatagagaaaacgcaggggttatgaataaaattgggacaacggataatacatcctttgtggataaaaatttaaaggcaaatacatcgtacaaatatgtagtgacagcggttgatttagctggaaatgaatctagtagaagtaatgttttagctgtaacaacaaagctagaggactctacttatgaaaaatgggatgcaagaaaagcatatactaaaggtgatagagtagtatatgagggaaaagtgtatgaagcggttcaaagttatcaagggaacggcgatccaaattggatttttgcactatcgctttggaagccagttttaaataaatga

SEQ ID NO: 146 - protein, 458 aa, Bacillus cereus
MNLKLTSKLEKLRKSKKGIGACVLAAGVAAITMIPQSTYAHGFVEKPSSRAALCSQNYGALNLNCGNVMYEPQSLEAPKGFPEGGPINGKIASAGGLFGGILDQQTSNRWFKNTIKGGANTFTWKYTAAHSTSKWHYYITKKGWDPNKPLTRADLEPIGTVKHDGSAASNNVTHTINVPTDRNGYHVILAVWDVADTSNAFYNVIDVNLVNNETPDTVAPSQPTGLNASKVSANSVALTWKASTDNIGVKEYQVLRNGEVIDTVPGTTFIDKKLKANTEYTYTIKALDSAGNISKESEKLKVKTTNGIPDIEAPTQPKGLHSMGTTATTVDLMWSPSEDNVGVDHYVVYRENAGVMNKIGTTDNTSFVDKNLKANTSYKYVVTAVDLAGNESSRSNVLAVTTKLEDSTYEKWDARKAYTKGDRVVYEGKVYEAVQSYQGNGDPNWIFALSLWKPVLNK

SEQ ID NO: 147 - DNA, 1377 bp, Bacillus cereus; identical to SEQ ID NO: 145

SEQ ID NO: 148 - protein, 455 aa, Bacillus cereus
MNNRFLKQLQNMKMNKKSLGAVALTAGIIGTTLIPQNAYAHGFVEKPSSRSALCSPTYGALNVNCGSVMYEPQSLEAPKGFPQGGPVDGQIASAGGKFGGVLDQQTADRWFKNTITGGENTFTWKYTAPHLTSKWHYYITKKGWNPNKALTRADFEPIGTVQHDGSAASNHLTHKINVPIDRSGYHVILAVWDVADTANAFYNVIDVNLINDVKPDTEAPSIPNGIQAQKVTAHSIELAWTASTDNVGVKGYQIFRNGEMIDTVPGTHFIDKKLQPSTEYSYTVKAIDAAGNASKESAKLTVKTTVEAPDTEAPTQPKGLHSMGTTTSSVDLMWSPSDDNIGVDHYDIYRETEGSMKKIATSNTTSYMDKNLLPNTTYKYVVKAVDVAGNESVQSDIFAITTKTESASYEEWDATKAYEKGDRVLYKGKIYEAVQSYKGNGDPNWIYALSLWKTV

SEQ ID NO: 149 - DNA, 1335 bp, Bacillus cereus
atgaagatgaacaagaaaagcctgggagccgttgcattaacggctggaatcataggcacgactctcattcctcaaaatgcatatgcacacggttttgttgaaaaacctggaagtcgttctgctttatgtagcccaacttacggcgcactgaacgtgaactgcggaagtattatgtatgagcctcaaagtttagaagctccaaaaggatttccgcaagttggcccagttgatgggcagattgcttcggcaggcgggaaatttggtggtattttggatcaacaaacaacagagcgttggtttaaaaatacgataacaggtggagaaaatacgttcacatggaagtatacagctcctcacttaacaagcaaatggcattactatattacgaaaaaaggttggaatccaaataaagcgctaacaagagcaaactttgagccaattggaactgtacaacatgatggttctgcagctttaaacaatttaaatcacaaaattaacgtacctactgatcgtagtggataccatgttattttagcggtatgggatgtagctgatacagcaaatgcattctataatgtaattgatgtaaatctagtcaataatgaaaaaccagacacagaagtaccaagtaatccaaatggacttgaggcaacaaaagttacagcaaatagtgtagaactagcatggaccgcttctacagataatgtaggggtaaaaggttatcaggtcctacgcaatggagagattattgacacagtaccaggcactcattttattgataaacaattacaaccaagtactgaatactcttatactgtaaaagcgattgacgcagctggaaatgtatcgaaagaaagtacggcagttaaagtgaaaacatcagtagcgattcttgatacaaaagcacctacacagccaaaaggattacacagcatgggaacgacagcatcaagtgttgatctgatgtggagtccgtctgacgataatgacggtgtagaccattacgatatttacagagaaatatcaggcgtaatgaaaaaaattggaacatccaacactacttctcatatggacaaaaatttgcttgctaatactacatataaatatgcggtgaaagttgttgatgtagctggtaatgaatcaatacaaagcgatgtattcacagttaccacaaaaactgaaagcgcttcatacgaagcgtggaattcaaaaaaggcatataaaaagggagatagagtcgtacacgaagggaaagtgtatgaagctgtccaaaattaccaaggaaatggggatccaaactggatttatgctttatcattatggaaaacagtgtaa

SEQ ID NO: 150 - protein, 444 aa, Bacillus cereus
MKMNKKSLGAVALTAGIIGTTLIPQNAYAHGFVEKPGSRSALCSPTYGALNVNCGSIMYEPQSLEAPKGFPQVGPVDGQIASAGGKFGGILDQQTTERWFKNTITGGENTFTWKYTAPHLTSKWHYYITKKGWNPNKALTRANFEPIGTVQHDGSAALNNLNHKINVPTDRSGYHVILAVWDVADTANAFYNVIDVNLVNNEKPDTEVPSNPNGLEATKVTANSVELAWTASTDNVGVKGYQVLRNGEIIDTVPGTHFIDKQLQPSTEYSYTVKAIDAAGNVSKESTAVKVKTSVAILDTKAPTQPKGLHSMGTTASSVDLMWSPSDDNDGVDHYDIYREISGVMKKIGTSNTTSHMDKNLLANTTYKYAVKVVDVAGNESIQSDVFTVTTKTESASYEAWNSKKAYKKGDRVVHEGKVYEAVQNYQGNGDPNWIYALSLWKTV

SEQ ID NO: 151 - DNA, 1335 bp, Bacillus cereus
atgaaaatgaacaaaaaaagtctaggagctgttgcattaacagcgggaattatcggcacgacacttattcctcaaaatgcttacgcgcatggttttgttgaaaagcctggcagccgttccgctttatgtagtccaacttatggtgcactaaatgtaaactgcggaagtgttatgtatgaaccacaaagcttagaagcaccaaaaggattcccgcaagctggtccagttgatggacaaatcgcttctgcaggcggaaaatttggtggtattttggatcaacaaacagcggatcgttggtttaaaaatacaatcactggcggagaaaatacgtttacttggaagtttacagcgccacatttaacaagcaaatggcactactacattactaaaataggctggaatccaaataaagcactaacaagagcagactttgagccaattggaactgtacaacatgatggttccgcagcttcaaataatgtagcacacaaaatcaatgtacctacggatcgtagtggctaccatgtgattttagctgtatgggatgtagctgatacagcaaatgcgttctataatgtaattgatgtaaatctcatcaataatgtgaaaccagacacagaagcgccaagtattccaaatggaattcagacacaaaaagtaacagcgaatagtatagaactaacatggaacacttctacggataatgtaggagtaaaagggtatcaaatcttccgtaacggagagatgattgacaccgtaccaggcactcattttattgataagaaattacaaccaagtacagaatactcttatactgtaaaagcaattgacgcagctggcaatgtatcgaaagaaagtacagcgcttacagcaaaaacaacagttgaggctcctgatacagaagcaccaacacaaccaaaaggattacatagtatgggaacgacagcgtcaagtgtggacctaatgtggagtccatctgacgataatgttggtgtagaccattacgatatttatagagaaatagaaggaacaatgaaaaaaatcgcaacatctaatacgacttcttatatggataataatttactcgctaataagacttataaatatgtagtgaaagctgttgatgtagctggaaatgaatccgtacaaagtgatatattcacaattactacaaaaactgaaagcgtttcatatggagagtgggatgcaaagaaagcgtataaaaagggtgatagagtcctatacgaaggaaaagtgtatgaagccgtacaaaatcatcaaggaaatggggatccaaactggatttatgctttatccttatggagagcagtgtaa

SEQ ID NO: 152 - protein, 444 aa, Bacillus cereus
MKMNKKSLGAVALTAGIIGTTLIPQNAYAHGFVEKPGSRSALCSPTYGALNVNCGSVMYEPQSLEAPKGFPQAGPVDGQIASAGGKFGGILDQQTADRWFKNTITGGENTFTWKFTAPHLTSKWHYYITKIGWNPNKALTRADFEPIGTVQHDGSAASNNVAHKINVPTDRSGYHVILAVWDVADTANAFYNVIDVNLINNVKPDTEAPSIPNGIQTQKVTANSIELTWNTSTDNVGVKGYQIFRNGEMIDTVPGTHFIDKKLQPSTEYSYTVKAIDAAGNVSKESTALTAKTTVEAPDTEAPTQPKGLHSMGTTASSVDLMWSPSDDNVGVDHYDIYREIEGTMKKIATSNTTSYMDNNLLANKTYKYVVKAVDVAGNESVQSDIFTITTKTESVSYGEWDAKKAYKKGDRVLYEGKVYEAVQNHQGNGDPNWIYALSLWRAV

SEQ ID NO: 153 - DNA, 1335 bp, Bacillus cereus
atgaaaatgaacaaaaaaagtctaggagctgttgcattaacagccggaattatcggcacgacacttattcctcaaaatgcttacgcgcatggttttgttgaaaagcctggtagccgttccgctttatgtagtccaacttatggtgcactaaatgtaaactgcggaagtgttatgtatgaaccacaaagcttagaagcaccaaaaggattcccgcaagctggtccagttgatggacaaatcgcttctgcaggcggaaaatttggtggtattttggatcaacaaacagcagaccgttggtttaaaaatacaatcactggcggagaaaatacgtttacttggaagtttacagcgccacatttaacaagcaaatggcactactacattactaaaataggctggaatccaaataaagcactaacaagagcagactttgagccaattggaactgtacaacatgatggttccgcagcttcaaataatgtagcacacaaaatcaatgtacctacggatcgtagtggctaccatgtgattttagctgtatgggatgtagctgatacagcaaatgcgttctataatgtaattgatgtaaatctcatcaataatgtgaaaccagacacagaagcgccaagtattccaaatggaattcagacacaaaaagtaacagcgaatagtatagaactaacatggaacacttctacggataatgtaggagtaaaagggtatcaaatcttccgtaacggagagatgattgacaccgtaccaggcactcattttattgataagaaattacaaccaagtacagaatactcttatactgtaaaagcaattgacgcagctggcaatgtatcgaaagaaagtacagcgcttacagtaaaaacaacagttgaggctcctgatacagaagcaccaacacaaccaaaaggattacatagtatgggaacgacagcgtcaagtgtggacctaatgtggagtccatctgacgataatattggtgtagaccattacgatatttatagagaaatagaaggaacaatgaaaaaaatcgcaacatctaatacgacttcttatatggataataatttactcgctaataagacttataaatatgtagtgaaagctgttgatgtagctggaaatgaatccgtacaaagtgatatattcacaattactacaaaaactgaaagcgtttcatatggagagtgggatgcaaagaaagcgtataaaaagggtgatagagtcctatacgaaggaaaagtgtatgaagcagtacaaaatcatcaaggaaatggggatccaaactggatttatgctttatccttatggagagcagtgtaa

SEQ ID NO: 154 - protein, 444 aa, Bacillus cereus
MKMNKKSLGAVALTAGIIGTTLIPQNAYAHGFVEKPGSRSALCSPTYGALNVNCGSVMYEPQSLEAPKGFPQAGPVDGQIASAGGKFGGILDQQTADRWFKNTITGGENTFTWKFTAPHLTSKWHYYITKIGWNPNKALTRADFEPIGTVQHDGSAASNNVAHKINVPTDRSGYHVILAVWDVADTANAFYNVIDVNLINNVKPDTEAPSIPNGIQTQKVTANSIELTWNTSTDNVGVKGYQIFRNGEMIDTVPGTHFIDKKLQPSTEYSYTVKAIDAAGNVSKESTALTVKTTVEAPDTEAPTQPKGLHSMGTTASSVDLMWSPSDDNIGVDHYDIYREIEGTMKKIATSNTTSYMDNNLLANKTYKYVVKAVDVAGNESVQSDIFTITTKTESVSYGEWDAKKAYKKGDRVLYEGKVYEAVQNHQGNGDPNWIYALSLWRAV

SEQ ID NO: 155 - DNA, 1368 bp, Bacillus cereus
atgaataatcgattattaaaacaactacaaaacatgaaaatgaacaaaaaaagtctaggagctgttgcattaacagccggaattattggtacgacgcttattcctcaaaacacatatgcgcatggttttgttgaaaaacctggcagtcgatctgctttatgtagtccaacttatggtgcactaaatgtaaattgcggaagtgttatgtatgaaccgcaaagcttagaagcaccaaaaggatttccgcaaggtggcccagttgatggacaaatcgcttctgcaggtggtaagtttggtggtattttagatcaacaaacagccgatcgttggtttaaaaatacaattacaggcggggaaaatacatttacgtggaaatatacagcgcctcacttaacgagcaaatggcattactatattacaaaaaaaggatggaatccaaataaagcgctcacaagagcagatttagaaccaattggaactgtacaacatgatggctctgcagcctcaaatcatttaactcacaaaattaatgtacctactgatagaagtggatatcatgtgattttagcggtatgggatgtagctgatacagcaaatgcattctataatgtaattgatgttaatctcatcaatgacgtaaaaccagacacagaagctccaagcattccaaatagaattcaggcacaaaaagtaacagcgaatagtatagaactagcatggaacgcttctactgataatgtaggggtaaaagggtatcaaatcttccgtaacggagagatgattgatacagtaccaggaacttattttattgataaaaaattacaaccaagtacagaatactcttatactgtaaaagcaattgacgcagctggaaatgtatcgaaagaaagtgcaacgcttacagtgaaaacaacagttgaggttcctgatacagaagcaccaacacaaccaaaaggattacatagtatgggaacgacagcgtcaagtgtggatctaatgtggagtccttctgacgataatattggtgtagaccattacgatatttatagagaaacaaaagggttaatggaaaaaattgcaacatccaatacgacttcttatatggataaatatttactctctaatactacttataaatatgtagtgaaagctgttgatgtagctggaaatgaatctgtacagagtgatatattcataattactacaaaaactgaaagcgtttcatatgaagaatgggatgcaaagaaagcatatgaaaagggagatagagttctacacgagggaaaagtatatgaagcagtccaaagttataaaggaaatggagatccaaactggatttatgccttatcattatggaaaacagtgtaa

SEQ ID NO: 156 - protein, 455 aa, Bacillus cereus
MNNRLLKQLQNMKMNKKSLGAVALTAGIIGTTLIPQNTYAHGFVEKPGSRSALCSPTYGALNVNCGSVMYEPQSLEAPKGFPQGGPVDGQIASAGGKFGGILDQQTADRWFKNTITGGENTFTWKYTAPHLTSKWHYYITKKGWNPNKALTRADLEPIGTVQHDGSAASNHLTHKINVPTDRSGYHVILAVWDVADTANAFYNVIDVNLINDVKPDTEAPSIPNRIQAQKVTANSIELAWNASTDNVGVKGYQIFRNGEMIDTVPGTYFIDKKLQPSTEYSYTVKAIDAAGNVSKESATLTVKTTVEVPDTEAPTQPKGLHSMGTTASSVDLMWSPSDDNIGVDHYDIYRETKGLMEKIATSNTTSYMDKYLLSNTTYKYVVKAVDVAGNESVQSDIFIITTKTESVSYEEWDAKKAYEKGDRVLHEGKVYEAVQSYKGNGDPNWIYALSLWKTV

SEQ ID NO: 157 - DNA, 1368 bp, Bacillus cereus
atgaataatcgattattaaaacaactacaaaacatgaaaatgaacaaaaaaagtctaggagctgttgcattaacagctggaattattggcacgacacttattcctcaaaacgcatacgcgcacggttttgttgaaaagcctggcagccgatctgctttatgtagtccaacctatggtgcactgaatgtaaactgcggaagtattatgtatgaaccacaaagtttagaagctccaaaaggatttccacaagctggcccaattgatgggaaaattgcttctgcaggcggcaaatttggtggtattttggatcagcaaacagccgatcgttggtttaagaatacaattactggtggggaaaatacatttacttggaagtatacagcgcctcacttaacaagcaaatggcattactatattactaaaaaaggatggaacccaaataaagcgctaacaagagcagattttgaaccaattggaactgtacaacatgatggttctacggcttcaaatcatttaacgcacaaaatcaatgtgcctactgatcgtagtggatattatgtgattttagcagtatgggatgtagctgatacagcaaatgcattctataatgttattgatgttaatctcatcaatgacataaaaccagatacggaggctccaagtattccaaatggaattcaggcacaaaaagtaacagcgaatagtatagaactagcttggaacgattctacggataatgtaggggtaaaaggatatcaaatcttccgtaacggagaaatgatcgatacagtaccgggcactcattttattgataaaaaattacaaccaagcacggaatattcttatactgtaaaagcaattgacgcagctggaaatgcttcgaaagaaagtgcaaagcttacagtaaaaacggcagttgaggctcccgatacagaagcaccaacacaaccaaaaggattacatagtatgggaacaacatcttcaagtgtggatctaatgtggagtccttctgacgataacattggtgtagaccattacgatatttatagagaagaagaaggatcaatgaaaaagattgcaacatccaatacgacttcttatatggataaaaatttactctctaatactacttataaatatgtagtaaaagctgttgatgtagctggaaatgaatctgtacagagtgatatattcacaattactacaaaaactgaaagcgcttcatatgaagagtggaatgcaacgaaagcatatgaaaagggagatagagttctatacgagggaaaagtatatgaagcagtccagagttataaaggaaatggggatccaaactggatttatgccttatcattatggaaaacagtataa

SEQ ID NO: 158 - protein, 455 aa, Bacillus cereus
MNNRLLKQLQNMKMNKKSLGAVALTAGIIGTTLIPQNAYAHGFVEKPGSRSALCSPTYGALNVNCGSIMYEPQSLEAPKGFPQAGPIDGKIASAGGKFGGILDQQTADRWFKNTITGGENTFTWKYTAPHLTSKWHYYITKKGWNPNKALTRADFEPIGTVQHDGSTASNHLTHKINVPTDRSGYYVILAVWDVADTANAFYNVIDVNLINDIKPDTEAPSIPNGIQAQKVTANSIELAWNDSTDNVGVKGYQIFRNGEMIDTVPGTHFIDKKLQPSTEYSYTVKAIDAAGNASKESAKLTVKTAVEAPDTEAPTQPKGLHSMGTTSSSVDLMWSPSDDNIGVDHYDIYREEEGSMKKIATSNTTSYMDKNLLSNTTYKYVVKAVDVAGNESVQSDIFTITTKTESASYEEWNATKAYEKGDRVLYEGKVYEAVQSYKGNGDPNWIYALSLWKTV

SEQ ID NO: 159 - DNA, 1377 bp, Bacillus cereus
atgaatttgaaattaacatctaaattggaaagattaagaaaaagtaaaaaaggaattggtgcttgtgttttagctgcaggggtaacggctattactatgattcctcaaagtgcttatgcacatggatttgttgaaaagccaagtagccgtgctgctttatgtagtcagaattatggagcactgaatttaaattgtggaaatataatgtacgaacctcaaagcctagaagcacctaaaggattcccagatgggggaccgattgatggaaaaatcgcttcggcaggaggactgtttggaggaattcttgaccaacaaacatcaaatcgctggttcaaaaacacgattaagggtggagcaaatacctttacatggaaatatacagctgcacatcctacaagtaattggcattattacattacaaaaaagggatggaatcctaataaaccattaacacgtgctgaattagaaccaattggaactgtgaaacatgatggttctgccgcatcaaataatttaacacatacaattaatgtaccaactgatcgcaatggttatcatgttattttagctgtatgggatgtagcagatacgtcaaatgcgttttataatgttattgatgtaaatctagtaaataatgaaactcccgatacagtagctccaagtcaaccaactgaattaaatgcgtctaaagttactgccaatagtgttgcactaacatggaaggcttctacggataatataggtgtaaaggaatatcaagtgttacgcaatggggaagcaattgatacggtaccaggtacaacatttattgataaaaaattaaaagcagatacggaatatacctatacaataaaggcattagactctgctgggaacatatcaaaagaaagtgaaaaactaaaggttaagacaacacatgcaatcccagatatagaggctccaactcaaccaaaaggattacatagtatgggtacaacagcgacaactgttgacttgatgtggagtccgtctgaagataatgtaggcgtagaccattatattgtatatagagaaagcgctggggttatgaataaaattgggacagcggctaatacatcctttatggataaagatttgaaggctaatacatcgtataaatatgtagtgacggcggttgatttagctggaaatgaatctagtagaagtgatattttgaatgtaacaacaaaatcagaggattccacatatgaaaaatgggatgcaagaaaagcatatactaagggtgatagagtagtacatgagggaaaagtgtatgaagcggttcaagatcatcaaggaaatggtgactcaaattggatttttgccttatcgctttggaagccaattttgaataaatga

SEQ ID NO: 160 - protein, 458 aa, Bacillus cereus
MNLKLTSKLERLRKSKKGIGACVLAAGVTAITMIPQSAYAHGFVEKPSSRAALCSQNYGALNLNCGNIMYEPQSLEAPKGFPDGGPIDGKIASAGGLFGGILDQQTSNRWFKNTIKGGANTFTWKYTAAHPTSNWHYYITKKGWNPNKPLTRAELEPIGTVKHDGSAASNNLTHTINVPTDRNGYHVILAVWDVADTSNAFYNVIDVNLVNNETPDTVAPSQPTELNASKVTANSVALTWKASTDNIGVKEYQVLRNGEAIDTVPGTTFIDKKLKADTEYTYTIKALDSAGNISKESEKLKVKTTHAIPDIEAPTQPKGLHSMGTTATTVDLMWSPSEDNVGVDHYIVYRESAGVMNKIGTAANTSFMDKDLKANTSYKYVVTAVDLAGNESSRSDILNVTTKSEDSTYEKWDARKAYTKGDRVVHEGKVYEAVQDHQGNGDSNWIFALSLWKPILNK

SEQ ID NO: 161 - DNA, 1368 bp, Bacillus cereus
atgaagaatcaatttttaaaacaactacaaaacatgaaaatgaacaaaaaaagtctaggagctgttgcattaacagctggaattattggcacgacacttattcctcaaaacgcatacgcgcacggttttgttgaaaagccgagcagccgatctgctttatgtagtccaacttatggtgcactcaatgtaaattgcggaagtgttatgtatgaaccgcaaagcttagaagcaccaaaaggattcccgcaaggtggcccagttgatggtcaaatcgcttctgcaggtggtaagtttggtggtattttagatcaacaaacagccgatcgttggtttaaaaatacaattacaggcggggaaaatacatttacttggaaatatacagcgcctcacttaacgagcaaatggcattactatattacaaaaaaaggatggaatccaaataaagcgctcacaagagcagatttagaaccaattggaactgtacaacatgatggctctgcagcctcaaatcatttaactcacaaaattaatgtacctactgatagaagtggatatcatgtgattttagcggtatgggatgtagctgatacagcaaatgcattctataatgtcattgatgttaatctcatcaatgacgtaaaaccagacagagaagctccaagcattccaaatagaattcaggcacaaaaagtaacagcgaatagtatagaactagcatggaacgcttctacggataatgtaggggtaaaagggtatcaaatcttccgtaacggagagatgattgatacagtaccaggaactcattttattgataaaaaattacaaccaagtacagaatactcttatactgtaaaagcaattgacgcagctggaaatgtatcgaaagaaagtgcaacgcttacagtgaaaacaacagttgaggttcctgatacagaagcaccaacacaaccaaaaggattacatagtatgggaacgacagcgtcaagtgtggatctaatgtggagtccttctgacgataatattggtgtagaccattacgatatttatagagaaacaaaagggtcaatggaaaaaattgcaacatccaatacgacttcttatatggataaatatttactctctaatactacttataaatatgtagtgaaagctgttgatgtagctggaaatgaatctgtacagagtgatatattcataattactacaaaaactgaaagcgtttcatatgaagaatgggatgcaaagaaagcatatgaaaagggagatagagttctacacgagggaaaagtatatgaagcagtccaaagttataaaggaaatggggatccaaactggatttatgccttatcattatggaaaacagtgtaa

SEQ ID NO: 162 - protein, 455 aa, Bacillus cereus
MKNQFLKQLQNMKMNKKSLGAVALTAGIIGTTLIPQNAYAHGFVEKPSSRSALCSPTYGALNVNCGSVMYEPQSLEAPKGFPQGGPVDGQIASAGGKFGGILDQQTADRWFKNTITGGENTFTWKYTAPHLTSKWHYYITKKGWNPNKALTRADLEPIGTVQHDGSAASNHLTHKINVPTDRSGYHVILAVWDVADTANAFYNVIDVNLINDVKPDREAPSIPNRIQAQKVTANSIELAWNASTDNVGVKGYQIFRNGEMIDTVPGTHFIDKKLQPSTEYSYTVKAIDAAGNVSKESATLTVKTTVEVPDTEAPTQPKGLHSMGTTASSVDLMWSPSDDNIGVDHYDIYRETKGSMEKIATSNTTSYMDKYLLSNTTYKYVVKAVDVAGNESVQSDIFIITTKTESVSYEEWDAKKAYEKGDRVLHEGKVYEAVQSYKGNGDPNWIYALSLWKTV

SEQ ID NO: 163 - DNA, 1377 bp, Bacillus cereus
atgaatttgaaattaacatctaaattagaaagattaagaaaaagtaaaaaaggaattggtgcttgtgttttagctgcaggggtggcagcaattacaatgattcctcaaagtacatatgcacatgggtttgttgaaaaaccaagtagtcgtgctgctttatgtagtcagaattatggagcattaaatttaaattgtggaaatgtaatgtacgaacctcaaagtttagaagcacctaaaggattcccagaaggtggaccaattgatgggaaaattgcttcggcaggaggattgtttggaggaactcttgaccaacaaacatcaagtcgctggttcaaaaacacaattaagggtggagcaaatacatttacatggaaatatacagcggcacattctacaagcaaatggcattattacattacaaaaaaggggtgggatcctaataaaccattaacacgtgctgaattagaaccaattggaactgtgaaacatgatggttcggccgcatcaaataatttagcacatacaattaatgtaccaactgatcgtaatggttatcatgttattttagctgtatgggatgtagcagatacgtcaaatgcgttttataatgtaattgatgtaaatttagtaaataatgaaactcccgatacagtagctccaagtcaaccaactggattaaatgcgtctaaagtctctgccaatagtgttgaaataacatggaaggcctctactgataatataggtgtaaaagaatatcaagtgttacgcaatggagaagtaattgatacggtaccaggtacaacttttatcgataaaaaactaaaagcagatacggaatatacctatacaataaaggcattagactctgctggaaacatatcaaaagaaagtgaaaaaataaaggttaagacaacaaatgcaaccccagatatagaggctccgactcaaccaaaaggattacatagtatgggtacaacagcgacaactgttgatttgatgtggagtccatctgaagataatgtaggtgttgaccattatattgtatatagagaaagcgctggggttatgaataaaattgggacagcggataatacatcctttatggataaaaatttgaaggctaatacatcgtacaaatatgtagtgacggcggttgatttagttggaaatgaatctagtagaagtgatgttttgaatgtaactacaaagtcagaggattccatatatgaaaaatgggatgcaagaaaagcatatactaaaggtgatagagttgtatatgagggaaaagtatatgaagcggttcaagatcatcaaggaaatggcgactcaaattggatttttgccctatcgctttggaagccagttttgaataaatga

SEQ ID NO: 164 - protein, 458 aa, Bacillus cereus
MNLKLTSKLERLRKSKKGIGACVLAAGVAAITMIPQSTYAHGFVEKPSSRAALCSQNYGALNLNCGNVMYEPQSLEAPKGFPEGGPIDGKIASAGGLFGGTLDQQTSSRWFKNTIKGGANTFTWKYTAAHSTSKWHYYITKKGWDPNKPLTRAELEPIGTVKHDGSAASNNLAHTINVPTDRNGYHVILAVWDVADTSNAFYNVIDVNLVNNETPDTVAPSQPTGLNASKVSANSVEITWKASTDNIGVKEYQVLRNGEVIDTVPGTTFIDKKLKADTEYTYTIKALDSAGNISKESEKIKVKTTNATPDIEAPTQPKGLHSMGTTATTVDLMWSPSEDNVGVDHYIVYRESAGVMNKIGTADNTSFMDKNLKANTSYKYVVTAVDLVGNESSRSDVLNVTTKSEDSIYEKWDARKAYTKGDRVVYEGKVYEAVQDHQGNGDSNWIFALSLWKPVLNK

SEQ ID NO: 165 - DNA, 1368 bp, Bacillus cereus
atgaataatcgattattaaaacaactacaaaacatgaaaatgaacaaaaaaagtctaggagctgttgcattaacagctggaattattggcacgacacttattcctcaaaacgcatatgcgcacggttttgttgaaaagcctagcagccgatctgctttatgtagtccaacctatggtgcactaaatgcaaactgtggaagtgttatgtatgaaccacaaagtttggaagctccaaaagggttcccgcaagctggcccagttgatggccaaatcgcttctgcaggtggtaaatttggtggtgttttagatcaacaaacagctgatcgttggtttaaaaatacaatcacaggcggggaaaatacttttacttggaaatatacagcgcctcacttaacgagcaaatgggattactatattacaaaaaaaggatggaatccaaataaagcgctcacaagagcagattttgaaccaattggaactgtactacatgatggttctgcagcctcaaatcatttaactcacaaaatcaatgtacctactgatcgaagtggatatcatgtgattttagcagtatgggatgtagctgatacagcaaatgcattctataatgtaattgatgttaatcttatcaatgatgtgaaaccagatatagaagctccaagtactccaaatggaattcagacacaaaaagtaacagcgaatagtatagaactaacgtggaacgcttctacggataatgtaggggtaaaagggtatcaaatcttccgtaacggagagatgattgatacagtaccaggaactcattttattgataaaaaattacaaccaagtacaaaatactcttatactgtaaaagctattgacgcagctggaaatgtctcgaaagaaagtgcaatgcttacagtaaaaacaacagttgaggctcctgatacagaagcaccaacacaaccaaaaggattacatagtatgggaacgacagcgtcaagtgtagatttaatgtggagtccatctgacgataatattggtgtagaccattacgatatttatagagaaacagaaggattaatgaaaaagattgcaacatctaatacgacttcttatatggataaaaatttacttcctaatactacttataaatatgtagtgaaagctgttgatttagctggaaatgaatctgtacagagtgatatatttataattactacaaaagctgaaagcgcttcatatgaagattgggatgcaaagaaagcatatgaaaagggagatagagttctacacgaaggaaaagtatatgaagcagtccagagctatcaaggaaatggggatccaaactggatttatgccttatcattatggaaaacagtgtaa

SEQ ID NO: 166 - protein, 455 aa, Bacillus cereus
MNNRLLKQLQNMKMNKKSLGAVALTAGIIGTTLIPQNAYAHGFVEKPSSRSALCSPTYGALNANCGSVMYEPQSLEAPKGFPQAGPVDGQIASAGGKFGGVLDQQTADRWFKNTITGGENTFTWKYTAPHLTSKWDYYITKKGWNPNKALTRADFEPIGTVLHDGSAASNHLTHKINVPTDRSGYHVILAVWDVADTANAFYNVIDVNLINDVKPDIEAPSTPNGIQTQKVTANSIELTWNASTDNVGVKGYQIFRNGEMIDTVPGTHFIDKKLQPSTKYSYTVKAIDAAGNVSKESAMLTVKTTVEAPDTEAPTQPKGLHSMGTTASSVDLMWSPSDDNIGVDHYDIYRETEGLMKKIATSNTTSYMDKNLLPNTTYKYVVKAVDLAGNESVQSDIFIITTKAESASYEDWDAKKAYEKGDRVLHEGKVYEAVQSYQGNGDPNWIYALSLWKTV

SEQ ID NO: 167 - DNA, 1359 bp, Bacillus sp B14905
atgatgaacactaaatttacaaaattaagcaaaaaaggtctaagtgctgccctattagcagccggaatcatagggatttcgacagctccaaatgcatatgcacatggatttgttgaaaaaccagctagccgtgcagccttatgtactcaaaattatggagcacttaacttaatgtgtggaagcataatgtatgaaccacagagtttagaggcgcctaaaggatttccacaaagtggaccgatggatggaaaaattgcatctgcaggaggtctttttggtggtatccttgatcaacaaacgacagatcgttggtttaagaatacagttacgggagggcctaatacatttacatggaagtatactgcgccacatttaacaagcaaatggcattattatattactaaacgtgattggaatcctaataaaccattaactcgcgctgatcttgagccaattggaactgtagcacataatggctctgctgcatcgactaatttaactcatacaattaacgtgccaacagatcgtagtggctatcacgtgatcctagccgtttgggatgtcgctgacacttcaaatgcgttttataatgtgattgatgtaaacttggtgaataatggtggcaatgtagatacggaagccccaactcagccaaatggattacatacagcaaaagttacttctactagtgccgagctaaaatggaacccttctacagataatgtaggtgtgaaagaatatcaagtattacgtgatggcaaagtagttgcaactattccaggaacaacattcacagataaaaatttgaattccaatacaaaatatacttactcagtaaaggcagtagacgcagctgggaatgtttctacagtaagtgaatctctagttgtagaaacattgcatgctgctccagatacagaatcacctacgcaaccaacttcactacatacaatgggaatcacttcttcaagtgtcgacttaatgtggggtgcttcagaggataatgtagccgttgaccattatgtaatatatagagggtcaacaaaagaacaaatgactgctgttgggacttcaacaatcacatcatttatggatatgaatcttcaatcaaatacttcctatatatatgcagtaactgctgtagatgtagctgggaatgaatctattaaaagttccattttaactgtaacaactaaagagcaaagtacttcttatgagcaatggagtccattcaaggcatacaaaaaaggtgataaggtagagtatcaaggtaagaattatgaagcggttcaaagctatcaaggctatggagatccaaattggataaacgctttgtctttatggaaagaaattaaataa

SEQ ID NO: 168 - protein, 452 aa, Bacillus sp B14905
MMNTKFTKLSKKGLSAALLAAGIIGISTAPNAYAHGFVEKPASRAALCTQNYGALNLMCGSIMYEPQSLEAPKGFPQSGPMDGKIASAGGLFGGILDQQTTDRWFKNTVTGGPNTFTWKYTAPHLTSKWHYYITKRDWNPNKPLTRADLEPIGTVAHNGSAASTNLTHTINVPTDRSGYHVILAVWDVADTSNAFYNVIDVNLVNNGGNVDTEAPTQPNGLHTAKVTSTSAELKWNPSTDNVGVKEYQVLRDGKVVATIPGTTFTDKNLNSNTKYTYSVKAVDAAGNVSTVSESLVVETLHAAPDTESPTQPTSLHTMGITSSSVDLMWGASEDNVAVDHYVIYRGSTKEQMTAVGTSTITSFMDMNLQSNTSYIYAVTAVDVAGNESIKSSILTVTTKEQSTSYEQWSPFKAYKKGDKVEYQGKNYEAVQSYQGYGDPNWINALSLWKEIK

SEQ ID NO: 169 - DNA, 1374 bp, Bacillus thuringiensis
atgaataataaatttttatttacaaacacacgcaaaagaaaaaaaagtattaatgccgctatattagcagctggaattattggaatcacaatggtacctgaaaatgcatacgcacatggattcgttgagaaaccggctagccgtgctgctttatgtagtctaagttacggtgcccttaactcaaattgtggaagaataatgtacgaaccacaaagtctagaaactctaaaaggttttccacaaagtggaccaattgatggtaaaattgcctctgcgggtggactttttgagggaattctcgatcaacaaacatcaaatcgttggtataagaatacaattaaaggaggattaaatacatttacgtggaaatacactgcaacgcatcctacaagtaaatggcattattatattactaaaaaaggttgggatccaaataaaccattaacacgagcagaccttgaaccaattgggacggtcgagcatgacggctctcaagctgcaaataatctaactcatacaattaatgtaccaactgaccgtagcggataccacattattttagctgtatgggatgtatctaatacctcaaatgctttctacaatgtaatagatgtcaatttagtaaatgacgagaatccagatttggaagccccaactcaaccaactggattacatgcaaaaaaagttacttctagcagtatcgagctaaattggaactcttctacagacaatgtaggtgtaaaagaatatcaagttttacgcaatggaaaagttattgaaactgtagcaggaacatccattacagacaaagaattaacagcaaatacagattatacatatacagtaaaagcaattgatatagctggaaatatgtccggggaaagtcaacctttaatcgtaaggacaacagaggatgttccagacacagaagctccaactcaaccaactgcactacatagcatggaggtaacatcttcaagtatagatttaatgtggagtgcatcaaacgataatatggaagttgatcattacgctatttatcgcgaaacatcgacaggacaaatgaaagtagttggaacatctaaaactaattcttttatggacaaaaatctacaatcgaatactacatataaatatgcagttactgcaatagatacatcaggaaatgaatctattaaaagtaacactttgactattactacaaaagaactaggttccccttatgagcaatggaatgcatacaaagcatatacaaaaggcgataaagtagaacacaaaggcaaaatatatgaagccgttcaaagttatcaaggacagggggacccaaattggatatttgcattatcattatggaaagaaatcacaaataattaa

SEQ ID NO: 170 - protein, 457 aa, Bacillus thuringiensis
MNNKFLFTNTRKRKKSINAAILAAGIIGITMVPENAYAHGFVEKPASRAALCSLSYGALNSNCGRIMYEPQSLETLKGFPQSGPIDGKIASAGGLFEGILDQQTSNRWYKNTIKGGLNTFTWKYTATHPTSKWHYYITKKGWDPNKPLTRADLEPIGTVEHDGSQAANNLTHTINVPTDRSGYHIILAVWDVSNTSNAFYNVIDVNLVNDENPDLEAPTQPTGLHAKKVTSSSIELNWNSSTDNVGVKEYQVLRNGKVIETVAGTSITDKELTANTDYTYTVKAIDIAGNMSGESQPLIVRTTEDVPDTEAPTQPTALHSMEVTSSSIDLMWSASNDNMEVDHYAIYRETSTGQMKVVGTSKTNSFMDKNLQSNTTYKYAVTAIDTSGNESIKSNTLTITTKELGSPYEQWNAYKAYTKGDKVEHKGKIYEAVQSYQGQGDPNWIFALSLWKEITNN

SEQ ID NO: 171 - DNA, 1284 bp, Lysinibacillus sphaericus
atgatgaacactaaattctcaaaattaagcaaaaaaggactgagtgctgccctattagcagccggaatcatagggatttcgacagctccaaatgcatatgctcatggatttgttgaaaaaccagctagccgagcagcgttatgtactcaaaattatggagcacttaacttaatgtgtggaagcatcatgtatgagcctcagagtctagaggcgcctaaaggatttccgcaaagtggacctctagatggaaaaattgcatctgcgggtggtctttttggtggtatccttgatcaacaaactgcagatcgctggtataagaatacgattacgggaggtcccaatacttttacatggaaatatactgcgccacatttaacaagcaaatggcactattatattacaaaacgtgattggaatcctaacaaacctttaacccgtgctgaccttgagccaattggtactgtagcacataatggcactgctgcatcgactaatttaactcataccattaacgtgccgacggaccgtaatggctaccacgttattctagccgtttgggatgtcgcagacacttcaaatgcattctataatgtgattgatataaatttggttaataatggtggcaatgtggatatggaagccccatctcaaccaaatggtttacatacaacaaaagttacttctactagcgccgagctaaaatggaacccttctactgataatgtaggtgtaaaagaatatcaagtattacgtgatggcaaagtagttgccactatcccaggaacgacatttatagataaacatttaaattccaatacaacctatacttactctgtaaaggctgtagacgcagctgggaatgtttctacagtaagtgagtctctagttgtaaaaacattgaatgctgctccagatacagaatcccctactcaaccaacttcactacatacaatgggaattacttcttcaagtgtagacttaatgtggggtgcttcagaggataatgtagccgttgaccattatgttatatatagagggtcaacaaaagaacaaatgtctgcagttgggacttccacaatcccatcatttatggacatgaatcttcaatcaagcacttcatatatgtatgcagtaactgccgtagatgcagctggaaatgagtccattaaaagttctattttaactgtaacgactaaggagcaaggtgcttcttatgagcaatggagtccatttaaggcgtacaaaaaaggagataaggtagagtatcaaggtaaaaatttatga

SEQ ID NO: 172 - protein, 427 aa, Lysinibacillus sphaericus
MMNTKFSKLSKKGLSAALLAAGIIGISTAPNAYAHGFVEKPASRAALCTQNYGALNLMCGSIMYEPQSLEAPKGFPQSGPLDGKIASAGGLFGGILDQQTADRWYKNTITGGPNTFTWKYTAPHLTSKWHYYITKRDWNPNKPLTRADLEPIGTVAHNGTAASTNLTHTINVPTDRNGYHVILAVWDVADTSNAFYNVIDINLVNNGGNVDMEAPSQPNGLHTTKVTSTSAELKWNPSTDNVGVKEYQVLRDGKVVATIPGTTFIDKHLNSNTTYTYSVKAVDAAGNVSTVSESLVVKTLNAAPDTESPTQPTSLHTMGITSSSVDLMWGASEDNVAVDHYVIYRGSTKEQMSAVGTSTIPSFMDMNLQSSTSYMYAVTAVDAAGNESIKSSILTVTTKEQGASYEQWSPFKAYKKGDKVEYQGKNL

SEQ ID NO: 173 - DNA, 663 bp, Lysinibacillus sphaericus
atgatgaacactaaattctcaaaattaagcaaaaaaggactgagtgctgccctattagcagccggaatcatagggatttcgacagctccaaatacatatgcgcatggatttgttgaaaaaccagctagccgagcagccttatgtactcaaaattatggagcacttaatttaatgtgtggaagcatcatgtatgagcctcagagtctagaggcgcctaaaggatttccgcaaagtggacctctagatggaaaaattgcatctgcaggtggcctttttggtggtatccttgatcagcaaactgcagatcgctggcataagaatacaattacgggaggtcccaatacttttacatggaaatatactgcgccacattcaacaagcaaatggcactattatattacaaaacgtgattggaatcctaacaaacctttaacccgtgctgaccttgagccaattggtactgtagcacataatggcactgctgcatcgactaatttaactcataccattaacgtgccgacggaccgtaatggctaccacgttattctagccgtttgggatgtcgcagacacttcaaatgcattctataatgtgattgatataaatttgataaataatggtatctatgtggatatggaagccccatctcaaccaaatggttaa

SEQ ID NO: 174 - protein, 220 aa, Lysinibacillus sphaericus
MMNTKFSKLSKKGLSAALLAAGIIGISTAPNTYAHGFVEKPASRAALCTQNYGALNLMCGSIMYEPQSLEAPKGFPQSGPLDGKIASAGGLFGGILDQQTADRWHKNTITGGPNTFTWKYTAPHSTSKWHYYITKRDWNPNKPLTRADLEPIGTVAHNGTAASTNLTHTINVPTDRNGYHVILAVWDVADTSNAFYNVIDINLINNGIYVDMEAPSQPNG

SEQ ID NO: 175 - DNA, 558 bp, Bacillus anthracis
atgaataatcgattattaaaacaactacaaaacatgaaaatgaacaagaaaagtctaggagctgttgcattaacagccggaattattggtacgacgcttattcctcaaaacacatatgcgcatggttttgttgaaaaacctggcagtcgatctgctttatgtagtccaacttatggtgcattaaatgtaaattgcggaagtgttatgtatgaaccacaaagtctggaagctccaaaaggcttcccacaagggggcccagttgatggacaaatcgcttctgcaggtggtaaatttggtggtattttagatcaacaaacagccgatcgttggtttaaaaatacaatcactggtggagaaaatacatttacttggaagtatacagcgcctcacttaacgagtaaatggcattactatattacaaaaaaaggatggaatccaaataaagcgctcacaagagctgattttgaaccgattggaactgtacaacatgatggttctgcagcctcaaatcatttaactcacaaaattaatgtacctactgaagtggatatcatgtga

SEQ ID NO: 176 - protein, 185 aa, Bacillus anthracis
MNNRLLKQLQNMKMNKKSLGAVALTAGIIGTTLIPQNTYAHGFVEKPGSRSALCSPTYGALNVNCGSVMYEPQSLEAPKGFPQGGPVDGQIASAGGKFGGILDQQTADRWFKNTITGGENTFTWKYTAPHLTSKWHYYITKKGWNPNKALTRADFEPIGTVQHDGSAASNHLTHKINVPTEVDIM

SEQ ID NO: 177 - DNA, 1164 bp, Bacillus thuringiensis
atgtatgaaccacaaagtttagaagctccaaaagggttcccacaaggtggtccagtagatggacaagttgcttcagcaggcggaaaatttggtggtattttagatcaacaaacagcaaatcgttggtttaaaaatacaatcactggtggggaaaatacatttacttggaagtatactgcgcctcacttaacgagtaagtggcattactatattactaaaaaaggatggaatccaaataaagcgctaacaagagcagattttgaaccaattggaactgtgcaacacgatggttctgcagcttcaaataatttaactcataaaattaatgtacctactgatcgtagtggatatcatgtgattttagcagtatgggatgtagctgatacagcaaatgcattctataatgtaattgatgttaatcttattaatgatgtgaaaccagacatagaagcgccaagtattccaaatggacttcagacgaaaaaagtaacagcgaatagtgtagaactaacatggaactcttctacggataatgtaggggtaaaaggatatcaaatcttccgtaacggagagatgatagatacaatactaggcactcattttattgataagaaattacaaccaagcacagaatactcttatactgtaaaagcaattgacgcagctggaaatgtatcgaaagaaagtacagcgcttacagtaaaaacaacagttgcgactcctgatacagaagcaccaacacaaccaaaaggattacatagtatgggaacgacagcatcaagtgtggatttaatgtggagtccatctgacgataacattggtgtagaccattatgatatttatagagaaatagaaggattaatgaaaaagattgcaacatccaatacaacttcttatatggataaaaatctgcttgctaatactacttataaatatgtagtgaaagctgttgatgtagctggaaatgaatccgtacagagtgatatattcacaattactacaaaagctgaaagcgcttcatatgaagcgtgggatgcaaaaaaagcatataaaaagggagatagagttctacacgaaggaaaagtatatgaagcagtccagagttatcaaggaaatggtgatccaaactggatttatgcattatcattatggaaaacagtgtaa

SEQ ID NO: 178 - protein, 387 aa, Bacillus thuringiensis
MYEPQSLEAPKGFPQGGPVDGQVASAGGKFGGILDQQTANRWFKNTITGGENTFTWKYTAPHLTSKWHYYITKKGWNPNKALTRADFEPIGTVQHDGSAASNNLTHKINVPTDRSGYHVILAVWDVADTANAFYNVIDVNLINDVKPDIEAPSIPNGLQTKKVTANSVELTWNSSTDNVGVKGYQIFRNGEMIDTILGTHFIDKKLQPSTEYSYTVKAIDAAGNVSKESTALTVKTTVATPDTEAPTQPKGLHSMGTTASSVDLMWSPSDDNIGVDHYDIYREIEGLMKKIATSNTTSYMDKNLLANTTYKYVVKAVDVAGNESVQSDIFTITTKAESASYEAWDAKKAYKKGDRVLHEGKVYEAVQSYQGNGDPNWIYALSLWKTV

SEQ ID NO: 179 - DNA, 1164 bp, Bacillus cereus
atgtatgaaccgcaaagcttagaagcaccaaaaggattcccgcaaggtggcccagttgatggacaaatcgcttctgcaggcggaaaatttggcggtattttagatcaacaaactgaaaatcgttggtttaaaaatacaatcacaggcggagaaaatagttttacttggaaatatacagcgcctcacttaacgagtaaatggcattactatattaccaaaaaaggatggaactcaaataaatcgcttacaagagcagattttgaaccaattggaactgtacaacatgatggttctgcagcctcaaatcatttaactcacaaagttaatgtacctactgatagaagtggataccatgtgattttagcagtatgggatgtagctgatacagcaaatgcattctataatgttattgatgttaatcttatcaatgatgtgaaaccagatatagaagctccaagtagtccaaatggaattcaggcacaaaaagtaacagcgaatagtatagaactaacatggaactcttctacggataatgtaggggtaaaagggtatcaaatcttccgtaacggagagatgattgacacagtaccaggaactcattttattgataaaaaattacaagcgagtacagagtattcttatattgtaaaagcgatcgacgcagctgggaatgtatcgaaagaaagccaatcgcttacagtaaaaacaactgttgagactcctgatacagaagcaccaacacaaccaaaaggattacatagtatgggaacgacagcgtcaagtgtggatctaatgtggagtccttctgacgataatattggtgtagaccattacgatatttatagagaaacagaaggatcaatgaaaaagattgcaacatccaatgcgacttcttatatggataaaaatttacttcctaatactacttataaatatgtagtgaaagctgttgatgtagctggaaatgaatccgtacagagtgatatattcgtaattaccacaaaaactgaaagcgcttcatatgaagagtgggatgcgaagaaagcatacgaaaagggagatagagtactacacgaaggaaaagtatatgaagcagtccagggttataaaggaaatggggatccaaactggatttatgccttatcattatggaaaacagtgtaa

SEQ ID NO: 180 - protein, 387 aa, Bacillus cereus
MYEPQSLEAPKGFPQGGPVDGQIASAGGKFGGILDQQTENRWFKNTITGGENSFTWKYTAPHLTSKWHYYITKKGWNSNKSLTRADFEPIGTVQHDGSAASNHLTHKVNVPTDRSGYHVILAVWDVADTANAFYNVIDVNLINDVKPDIEAPSSPNGIQAQKVTANSIELTWNSSTDNVGVKGYQIFRNGEMIDTVPGTHFIDKKLQASTEYSYIVKAIDAAGNVSKESQSLTVKTTVETPDTEAPTQPKGLHSMGTTASSVDLMWSPSDDNIGVDHYDIYRETEGSMKKIATSNATSYMDKNLLPNTTYKYVVKAVDVAGNESVQSDIFVITTKTESASYEEWDAKKAYEKGDRVLHEGKVYEAVQGYKGNGDPNWIYALSLWKTV

SEQ ID NO: 181 - protein, 19 aa, Thielavia terrestris
  MISC_FEATURE (1)..(1): X=I,L,M, OR V
  MISC_FEATURE (3)..(6): X=ANY AMINO ACID
  MISC_FEATURE (8)..(8): X=ANY AMINO ACID
  MISC_FEATURE (10)..(10): X=I, L, M, OR V
  MISC_FEATURE (11)..(11): X=ANY AMINO ACID
  MISC_FEATURE (13)..(13): X=ANY AMINO ACID
  MISC_FEATURE (14)..(14): X=E OR Q
  MISC_FEATURE (15)..(18): X=ANY AMINO ACID
  MISC_FEATURE (19)..(19): X=H, N, OR Q
XPXXXXGXYXXRXXXXXXX

SEQ ID NO: 182 - protein, 20 aa, Thielavia terrestris
  MISC_FEATURE (1)..(1): X=I, L, M, OR V
  MISC_FEATURE (3)..(7): X=ANY AMINO ACID
  MISC_FEATURE (9)..(9): X=ANY AMINO ACID
  MISC_FEATURE (11)..(11): X=I, L, M, OR V
  MISC_FEATURE (12)..(12): X=ANY AMINO ACID
  MISC_FEATURE (14)..(14): X=ANY AMINO ACID
  MISC_FEATURE (15)..(15): X=E OR Q
  MISC_FEATURE (16)..(19): X=ANY AMINO ACID
  MISC_FEATURE (20)..(20): X=H, N, OR Q
XPXXXXXGXYXXRXXXXXXX

SEQ ID NO: 183 - protein, 9 aa, Thielavia terrestris
  MISC_FEATURE (2)..(2): X=ANY AMINO ACID
  MISC_FEATURE (5)..(7): X=ANY AMINO ACID
  MISC_FEATURE (8)..(8): X=Y OR W
  MISC_FEATURE (9)..(9): X=A, I, L, M, OR V
HXGPXXXXX

SEQ ID NO: 184 - protein, 10 aa, Thielavia terrestris
  MISC_FEATURE (2)..(3): X=ANY AMINO ACID
  MISC_FEATURE (6)..(8): X=ANY AMINO ACID
  MISC_FEATURE (9)..(9): X=Y OR W
  MISC_FEATURE (10)..(10): X=A, I, L, M, OR V
HXXGPXXXXX

SEQ ID NO: 185 - protein, 11 aa, Thielavia terrestris
  MISC_FEATURE (1)..(1): X=E OR Q
  MISC_FEATURE (2)..(2): X=ANY AMINO ACID
  MISC_FEATURE (4)..(5): X=ANY AMINO ACID
  MISC_FEATURE (7)..(7): X=ANY AMINO ACID
  MISC_FEATURE (8)..(8): X=E, H, Q, OR N
  MISC_FEATURE (9)..(9): X=F, I, L, OR V
  MISC_FEATURE (10)..(10): X=ANY AMINO ACID
  MISC_FEATURE (11)..(11): X=I, L, OR V
XXYXXCXXXXX

SEQ ID NO: 186 - protein, 9 aa, Thielavia terrestris
  MISC_FEATURE (2)..(2): X=ANY AMINO ACID
  MISC_FEATURE (5)..(7): X=ANY AMINO ACID
  MISC_FEATURE (8)..(8): X=Y OR W
  MISC_FEATURE (9)..(9): X=A, I, L, M, OR V
HXGPXXXXX

SEQ ID NO: 187 - protein, 10 aa, Thielavia terrestris
  MISC_FEATURE (2)..(3): X=ANY AMINO ACID
  MISC_FEATURE (6)..(8): X=ANY AMINO ACID
  MISC_FEATURE (9)..(9): X=Y OR W
  MISC_FEATURE (10)..(10): X=A, I, L, M, OR V
HXXGPXXXXX

SEQ ID NO: 188 - protein, 11 aa, Thielavia terrestris
  MISC_FEATURE (1)..(1): X=E OR Q
  MISC_FEATURE (2)..(2): X=ANY AMINO ACID
  MISC_FEATURE (4)..(5): X=ANY AMINO ACID
  MISC_FEATURE (7)..(7): X=ANY AMINO ACID
  MISC_FEATURE (8)..(8): X=E, H,Q, OR N
  MISC_FEATURE (9)..(9): X=F, I, L, OR V
  MISC_FEATURE (10)..(10): X=ANY AMINO ACID
  MISC_FEATURE (11)..(11): X=I, L, OR V
XXYXXCXXXXX

SEQ ID NO: 189 - protein, 19 aa, Thielavia terrestris
  MISC_FEATURE (1)..(1): X=I, L, M, OR V
  MISC_FEATURE (3)..(6): X=ANY AMINO ACID
  MISC_FEATURE (8)..(8): X=ANY AMINO ACID
  MISC_FEATURE (10)..(10): X=I, L, M, OR V
  MISC_FEATURE (11)..(11): X=ANY AMINO ACID
  MISC_FEATURE (13)..(13): X=ANY AMINO ACID
  MISC_FEATURE (14)..(14): X=E OR Q
  MISC_FEATURE (15)..(17): X=ANY AMINO ACID
  MISC_FEATURE (19)..(19): X=H, N, OR Q
XPXXXXGXYXXRXXXXXAX

SEQ ID NO: 190 - protein, 20 aa, Thielavia terrestris
  MISC_FEATURE (1)..(1): X=I, L, M, OR V
  MISC_FEATURE (3)..(7): X=ANY AMINO ACID
  MISC_FEATURE (9)..(9): X=ANY AMINO ACID
  MISC_FEATURE (11)..(11): X=I, L, M, OR V
  MISC_FEATURE (12)..(12): X=ANY AMINO ACID
  MISC_FEATURE (14)..(14): X=ANY AMINO ACID
  MISC_FEATURE (15)..(15): X=E OR Q
  MISC_FEATURE (16)..(18): X=ANY AMINO ACID
  MISC_FEATURE (20)..(20): X=H, N, OR Q
XPXXXXXGXYXXRXXXXXAX

SEQ ID NO: 191 - DNA, 1846 bp, Thielavia terrestris
aattgaaggagggagtggcggagtggccaccaagtcaggcggctgtcaactaaccaaggatgggaacagttcggctcgccttgcccgagggcagcgttccctgatggggacgaaccatgggactggggtcagctgctgtataaaagttcaaatcgatgatctctcagatggcgctgctggggtgttctgcgcttttccatcctcgcaacctggtatcccactagtccagcgttcggcaccatgaagtcgttcaccattgccgccttggcagccctatgggcccaggaggccgccgcccacgcgaccttccaggacctctggattgatggagtcgactacggctcgcaatgtgtccgcctcccggcgtccaactcccccgtcaccaatgttgcgtccgacgatatccgatgcaatgtcggcacctcgaggcccaccgtcaagtgcccggtcaaggccggctccacggtcacgatcgagatgcaccaggttcgcacgcctctctgcgtaggccccccagctactatatggcactaacacgacctccagcaacctggcgaccggtcttgcgccaacgaggctatcggcggcgaccactacggccccgtaatggtgtacatgtccaaggtcgatgacgcggtgacagccgacggttcatcgggctggttcaaggtgttccaggacagctgggccaagaacccgtcgggttcgacgggcgacgacgactactggggcaccaaggacctcaactcgtgctgcggcaagatgaacgtcaagatccccgaagacatcgagccgggcgactacctgctccgcgccgaggttatcgcgctgcacgtggccgccagctcgggcggcgcgcagttctacatgtcctgctaccagctgaccgtgacgggctccggcagcgccaccccctcgaccgtgaatttcccgggcgcctactcggccagcgacccgggcatcctgatcaacatccacgcgcccatgtcgacctacgtcgtcccgggcccgaccgtgtacgcgggcggctcgaccaagtcggctggcagctcctgctccggctgcgaggcgacctgcacggttggttccggccccagcgcgacactgacgcagcccacctccaccgcgaccgcgacctccgcccctggcggcggcggctccggctgcacggcggccaagtaccagcagtgcggcggcaccggctacactgggtgcaccacctgcgctgtaagttccctcgtgatatgcagcggaacaccgtctggactgttttgctaactcgcgtcgtagtccgggtctacctgcagcgccgtctcgcctccgtactactcgcagtgcctctaagccgggagcgcttgctcagcgggctgctgtgaaggagctccatgtccccatgccgccatggccggagtaccgggctgagcgcccaattcttgtatatagttgagttttcccaatcatgaatacatatgcatctgcatggactgttgcgtcgtcagtctacatcctttgctccactgaactgtgagaccccatgtcatccggaccattcgatcggtgctcgctctaccatctcggttgatgggtctgggcttgagagtcactggcacgtcctcggcggtaatgaaatgtggaggaaagtgtgagctgtctgacgcactcggcgctgatgagacgttgagcgcggcccacactggtgttctgtaagccagcacacaaaagaatactccaggatggcccatagcggcaaatatacagtatcagggatgcaaaaagtgcaaaagtaaggggctcaatcggggatcgaacccgagacctcgcacatgacttatttcaagtcaggggt

SEQ ID NO: 192 - protein, 326 aa, Thielavia terrestris
MKSFTIAALAALWAQEAAAHATFQDLWIDGVDYGSQCVRLPASNSPVTNVASDDIRCNVGTSRPTVKCPVKAGSTVTIEMHQQPGDRSCANEAIGGDHYGPVMVYMSKVDDAVTADGSSGWFKVFQDSWAKNPSGSTGDDDYWGTKDLNSCCGKMNVKIPEDIEPGDYLLRAEVIALHVAASSGGAQFYMSCYQLTVTGSGSATPSTVNFPGAYSASDPGILINIHAPMSTYVVPGPTVYAGGSTKSAGSSCSGCEATCTVGSGPSATLTQPTSTATATSAPGGGGSGCTAAKYQQCGGTGYTGCTTCASGSTCSAVSPPYYSQCL

SEQ ID NO: 193 - DNA, 880 bp, Thielavia terrestris
accccgggatcactgcccctaggaaccagcacacctcggtccaatcatgcggttcgacgccctctccgccctcgctcttgcgccgcttgtggctggccacggcgccgtgaccagctacatcatcggcggcaaaacctatcccggctacgagggcttctcgcctgcctcgagcccgccgacgatccagtaccagtggcccgactacaacccgaccctgagcgtgaccgacccgaagatgcgctgcaacggcggcacctcggcagagctcagcgcgcccgtccaggccggcgagaacgtgacggccgtctggaagcagtggacccaccagcaaggccccgtcatggtctggatgttcaagtgccccggcgacttctcgtcgtgccacggcgacggcaagggctggttcaagatcgaccagctgggcctgtggggcaacaacctcaactcgaacaactggggcaccgcgatcgtctacaagaccctccagtggagcaacccgatccccaagaacctcgcgccgggcaactacctcatccgccacgagctgctcgccctgcaccaggccaacacgccgcagttctacgccgagtgcgcccagctggtcgtctccggcagcggctccgccctgcccccgtccgactacctctacagcatccccgtctacgcgccccagaacgaccccggcatcaccgtgagtgggcttccgttccgcggcgagctctgtggaaatcttgctgacgatgggctaggttgacatctacaacggcgggcttacctcctacaccccgcccggcggccccgtctggtctggcttcgagttttaggcgcattgagtcgggggctacgaggggaaggcatctgttcgcatgagcgtgggtac

SEQ ID NO: 194 - protein, 239 aa, Thielavia terrestris
MRFDALSALALAPLVAGHGAVTSYIIGGKTYPGYEGFSPASSPPTIQYQWPDYNPTLSVTDPKMRCNGGTSAELSAPVQAGENVTAVWKQWTHQQGPVMVWMFKCPGDFSSSHGDGKGWFKIDQLGLWGNNLNSNNWGTAIVYKTLQWSNPIPKNLAPGNYLIRHELLALHQANTPQFYAECAQLVVSGSGSALPPSDYLYSIPVYAPQNDPGITVDIYNGGLTSYTPPGGPVWSGFEF

SEQ ID NO: 195 - DNA, 1000 bp, Thielavia terrestris
ctcctgttcctgggccaccgcttgttgcctgcactattggtagagttggtctattgctagagttggccatgcttctcacatcagtcctcggctcggctgccctgcttgctagcggcgctgcggcacacggcgccgtgaccagctacatcatcgccggcaagaattacccggggtgggtagctgattattgagggcgcattcaaggttcataccggtgtgcatggctgacaaccggctggcagataccaaggcttttctcctgcgaactcgccgaacgtcatccaatggcaatggcatgactacaaccccgtcttgtcgtgcagcgactcgaagcttcgctgcaacggcggcacgtcggccaccctgaacgccacggccgcaccgggcgacaccatcaccgccatctgggcgcagtggacgcacagccagggccccatcctggtgtggatgtacaagtgcccgggctccttcagctcctgtgacggctccggcgctggctggttcaagatcgacgaggccggcttccacggcgacggcgtcaaggtcttcctcgacaccgagaacccgtccggctgggacatcgccaagctcgtcggcggcaacaagcagtggagcagcaaggtccccgagggcctcgcccccggcaactacctcgtccgccacgagttgatcgccctgcaccaggccaacaacccgcagttctacccggagtgcgcccaggtcgtcatcaccggctccggcaccgcgcagccggatgcctcatacaaggcggctatccccggctactgcaaccagaatgacccgaacatcaaggtgagatccaggcgtaatgcagtctactgctggaaagaaagtggtccaagctaaaccgcgctccaggtgcccatcaacgaccactccatccctcagacctacaagattcccggccctcccgtcttcaagggcaccgccagcaagaaggcccgggacttcaccgcctgaagttgttgaatcgatggag

SEQ ID NO: 196 - protein, 258 aa, Thielavia terrestris
MLLTSVLGSAALLASGAAAHGAVTSYIIAGKNYPGYQGFSPANSPNVIQWQWHDYNPVLSCSDSKLRCNGGTSATLNATAAPGDTITAIWAQWTHSQGPILVWMYKCPGSFSSCDGSGAGWFKIDEAGFHGDGVKVFLDTENPSGWDIAKLVGGNKQWSSKVPEGLAPGNYLVRHELIALHQANNPQFYPECAQVVITGSGTAQPDASYKAAIPGYCNQNDPNIKVPINDHSIPQTYKIPGPPVFKGTASKKARDFTA

SEQ ID NO: 197 - DNA, 681 bp, Thielavia terrestris
atgctcgcaaacggtgccatcgtcttcctggccgccgccctcggcgtcagtggccactacacctggccacgggttaacgacggcgccgactggcaacaggtccgtaaggcggacaactggcaggacaacggctacgtcggggatgtcacgtcgccacagatccgctgtttccaggcgaccccgtccccggccccatccgtcctcaacaccacggccggctcgaccgtgacctactgggccaaccccgacgtctaccaccccgggcctgtgcagttttacatggcccgcgtgcccgatggcgaggacatcaactcgtggaacggcgacggcgccgtgtggttcaaggtgtacgaggaccatcctacctttggcgctcagctcacatggcccagcacgggcaagagctcgttcgcggttcccatccccccgtgcatcaagtccggctactacctcctccgggcggagcaaatcggcctgcacgtcgcccagagcgtaggcggagcgcagttctacatctcatgcgcccagctcagcgtcaccggcggcggcagcaccgagccgccgaacaaggtggccttccccggcgcttacagtgcgacggacccgggcattctgatcaacatctactaccctgttcccacgtcctaccagaaccccggcccggccgtcttcagctgctga

SEQ ID NO: 198 - protein, 226 aa, Thielavia terrestris
MLANGAIVFLAAALGVSGHYTWPRVNDGADWQQVRKADNWQDNGYVGDVTSPQIRCFQATPSPAPSVLNTTAGSTVTYWANPDVYHPGPVQFYMARVPDGEDINSWNGDGAVWFKVYEDHPTFGAQLTWPSTGKSSFAVPIPPCIKSGYYLLRAEQIGLHVAQSVGGAQFYISCAQLSVTGGGSTEPPNKVAFPGAYSATDPGILINIYYPVPTSYQNPGPAVFSC

SEQ ID NO: 199 - DNA, 960 bp, Thielavia terrestris
atgaagggacttttcagtgccgccgccctctccctggccgtcggccaggcttcggcccattacatcttccagcaactctccatcaacgggaaccagtttccggtgtaccaatatattcgcaagaacaccaattataacagtcccgttaccgatctcacgtccgacgatcttcggtgcaatgtcggcgcccagggtgctgggacagacaccgtcacggtgaaggccggcgaccagttcaccttcacccttgacacccctgtttaccaccaggggcccatctccatctacatgtccaaggccccgggcgcggcgtcagactacgatggcagcggcggctggttcaagatcaaggactggggcccgactttcaacgccgacggcacggccacctgggacatggccggctcatacacctacaacatcccgacctgcattcccgacggcgactatctgctccgcatccagtcgctggccatccacaacccctggccggcgggcatcccgcagttctacatctcctgcgcccagatcaccgtgaccggcggcggcaacggcaaccctggcccgacggccctcatccccggcgccttcaaggacaccgacccgggctacacggtgaacatctacacgaacttccacaactacacggttcccggcccggaggtcttcagctgcaacggcggcggctcgaacccgcccccgccggtgagtagcagcacgcccgcgaccacgacgctggtcacgtcgacgcgcaccacgtcctccacgtcctccgcctcgacgccggcctcgaccggcggctgcaccgtcgccaagtggggccagtgcggcggcaacgggtacaccggctgcacgacctgcgcggccgggtccacctgcagcaagcagaacgactactactcgcagtgcttgtaagggaggccgcaaagcatgaggtgtttgaagaggaggagaggggtc

SEQ ID NO: 200 - protein, 304 aa, Thielavia terrestris
MKGLFSAAALSLAVGQASAHYIFQQLSINGNQFPVYQYIRKNTNYNSPVTDLTSDDLRCNVGAQGAGTDTVTVKAGDQFTFTLDTPVYHQGPISIYMSKAPGAASDYDGSGGWFKIKDWGPTFNADGTATWDMAGSYTYNIPTCIPDGDYLLRIQSLAIHNPWPAGIPQFYISCAQITVTGGGNGNPGPTALIPGAFKDTDPGYTVNIYTNFHNYTVPGPEVFSCNGGGSNPPPPVSSSTPATTTLVTSTRTTSSTSSASTPASTGGCTVAKWGQCGGNGYTGCTTCAAGSTCSKQNDYYSQCL

SEQ ID NO: 201 - DNA, 954 bp, Thielavia terrestris
atgaagggcctcagcctcctcgccgctgcgtcggcagcgactgctcataccatcttcgtgcagctcgagtcagggggaacgacctatccggtatcctacggcatccgggaccctagctacgacggtcccatcaccgacgtcacctccgactcactggcttgcaatggtcccccgaaccccacgacgccgtccccgtacatcatcaacgtcaccgccggcaccacggtcgcggcgatctggaggcacaccctcacatccggccccgacgatgtcatggacgccagccacaaggggccgaccctggcctacctcaagaaggtcgatgatgccttgaccgacacgggtatcggcggcggctggttcaagatccaggaggccggttacgacaatggcaattgggctaccagcacggtgatcaccaacggtggcttccaatatattgacatccccgcctgcattcccaacggccagtatctgctccgcgccgagatgatcgcgctccacgccgccagcacgcagggtggtgcccagctctacatggagtgcgcgcagatcaacgtggtgggcggctccggcagcgccagcccgcagacgtacagcatcccgggcatctaccaggcaaccgacccgggcctgctgatcaacatctactccatgacgccgtccagccagtacaccattccgggtccgcccctgttcacctgcagcggcagcggcaacaacggcggcggcagcaacccgtcgggcgggcagaccacgacggcgaagcccacgacgacgacggcggcgacgaccacctcctccgccgctcctaccagcagccaggggggcagcagcggttgcaccgttccccagtggcagcagtgcggtggcatctcgttcaccggctgcaccacctgcgcggcgggctacacctgcaagtatctgaacgactattactcgcaatgccagtaa

SEQ ID NO: 202 - protein, 317 aa, Thielavia terrestris
MKGLSLLAAASAATAHTIFVQLESGGTTYPVSYGIRDPSYDGPITDVTSDSLACNGPPNPTTPSPYIINVTAGTTVAAIWRHTLTSGPDDVMDASHKGPTLAYLKKVDDALTDTGIGGGWFKIQEAGYDNGNWATSTVITNGGFQYIDIPACIPNGQYLLRAEMIALHAASTQGGAQLYMECAQINVVGGSGSASPQTYSIPGIYQATDPGLLINIYSMTPSSQYTIPGPPLFTCSGSGNNGGGSNPSGGQTTTAKPTTTTAATTTSSAAPTSSQGGSSGCTVPQWQQCGGISFTGCTTCAAGYTCKYLNDYYSQCQ

SEQ ID NO: 203 - DNA, 799 bp, Thermoascus aurantiacus
atgtccttttccaagataattgctactgccggcgttcttgcctctgcttctctagtggctggccatggcttcgttcagaacatcgtgattgatggtaaaaagtatgtcattgcaagacgcacataagcggcaacagctgacaatcgacagttatggcgggtatctagtgaaccagtatccatacatgtccaatcctccagaggtcatcgcctggtctactacggcaactgatcttggatttgtggacggtactggataccaaaccccagatatcatctgccataggggcgccaagcctggagccctgactgctccagtctctccaggaggaactgttgagcttcaatggactccatggcctgattctcaccatggcccagttatcaactaccttgctccgtgcaatggtgattgttccactgtggataagacccaattagaattcttcaaaattgccgagagcggtctcatcaatgatgacaatcctcctgggatctgggcttcagacaatctgatagcagccaacaacagctggactgtcaccattccaaccacaattgcacctggaaactatgttctgaggcatgagattattgctcttcactcagctcagaaccaggatggtgcccagaactatccccagtgcatcaatctgcaggtcactggaggtggttctgataaccctgctggaactcttggaacggcactctaccacgataccgatcctggaattctgatcaacatctatcagaaactttccagctatatcatccctggtcctcctctgtatactggttaa

SEQ ID NO: 204 - protein, 249 aa, Thermoascus aurantiacus
MSFSKIIATAGVLASASLVAGHGFVQNIVIDGKYYGGYLVNQYPYMSNPPEVIAWSTTATDLGFVDGTGYQTPDIICHRGAKPGALTAPVSPGGTVELQWTPWPDSHHGPVINYLAPCNGDCSTVDKTQLEFFKIAESGLINDDNPPGIWASDNLIAANNSWTVTIPTTIAPGNYVLRHEIIALHSAQNQDGAQNYPQCINLQVTGGGSDNPAGTLGTALYHDTDPGILINIYQKLSSYIIPGPPLYTG

SEQ ID NO: 205 - DNA, 1172 bp, Trichoderma reesei
ggatctaagccccatcgatatgaagtcctgcgccattcttgcagcccttggctgtcttgccgggagcgttctcggccatggacaagtccaaaacttcacgatcaatggacaatacaatcagggtttcattctcgattactactatcagaagcagaatactggtcacttccccaacgttgctggctggtacgccgaggacctagacctgggcttcatctcccctgaccaatacaccacgcccgacattgtctgtcacaagaacgcggccccaggtgccatttctgccactgcagcggccggcagcaacatcgtcttccaatggggccctggcgtctggcctcacccctacggtcccatcgttacctacgtggctgagtgcagcggatcgtgcacgaccgtgaacaagaacaacctgcgctgggtcaagattcaggaggccggcatcaactataacacccaagtctgggcgcagcaggatctgatcaaccagggcaacaagtggactgtgaagatcccgtcgagcctcaggcccggaaactatgtcttccgccatgaacttcttgctgcccatggtgcctctagtgcgaacggcatgcagaactatcctcagtgcgtgaacatcgccgtcacaggctcgggcacgaaagcgctccctgccggaactcctgcaactcagctctacaagcccactgaccctggcatcttgttcaacccttacacaacaatcacgagctacaccatccctggcccagccctgtggcaaggctagatccaggggtacggtgttggcgttcgtgaagtcggagctgttgacaaggatatctgatgatgaacggagaggactgatgggcgtgactgagtgtatatatttttgatgaccaaattgtatacgaaatccgaacgcatggtgatcattgtttatccctgtagtatattgtctccaggctgctaagagcccaccgggtgtattacggcaacaaagtcaggaatttgggtggcaatgaacgcaggtctccatgaatgtatatgtgaagaggcatcggctggcatgggcattaccagatataggccctgtgaaacatatagtacttgaacgtgctactggaacggatcataagcaagtcatcaacatgtgaaaaaacactacatgtaaaaaaaaaaaaaaaaaaaaa

SEQ ID NO: 206 - protein, 249 aa, Trichoderma reesei
MKSCAILAALGCLAGSVLGHGQVQNFTINGQYNQGFILDYYYQKQNTGHFPNVAGWYAEDLDLGFISPDQYTTPDIVCHKNAAPGAISATAAAGSNIVFQWGPGVWPHPYGPIVTYVVECSGSCTTVNKNNLRWVKIQEAGINYNTQVWAQQDLINQGNKWTVKIPSSLRPGNYVFRHELLAAHGASSANGMQNYPQCVNIAVTGSGTKALPAGTPATQLYKPTDPGILFNPYTTITSYTIPGPALWQG

SEQ ID NO: 207 - DNA, 924 bp, Myceliophthora thermophila
atgaagttcacctcgtccctcgctgtcctggccgctgccggcgcccaggctcactgttagtcgaccctcgaacccaacacccccctccccccttttctcctccatctcctcggcctcacttagtagccgctgacaacgactagataccttccctagggccggcactggtggctcgctctctggcgagtgggaggtggtccgcatgaccgagaaccattactcgcacggcccggtcaccgatgtcaccagccccgagatgacctgctatcagtccggcgtgcagggtgcgccccagaccgtccaggtcaaggcgggctcccaattcaccttcagcgtggatccctcgatcggccaccccggccctctccagttctacatggctaaggtgccgtcgggccagacggccgccacctttgacggcacgggagccgtgtggttcaagatctaccaagacggcccgaacggcctcggcaccgacagcattacctggcccagcgccggttcgtgacttcctccccactcgcttttttttttttattttttatttttttttctttcggaactcaagaatctttctctctctctcccgtctttggccttgaacaacactaaaactcttccttactgtattaattaggcaaaaccgaggtctcggtcaccatccccagctgcatcgatgatggcgagtacctgctccgggtcgagcacatcgcgctccacagcgccagcagcgtgggcggcgctcagttctacattgcctgcgcccagctctccgtcaccggcggctccggcaccctcaacacgggctcgctcgtctccctgcccggcgcctacaaggccaccgacccgggcatcctcttccagctctactggcccatcccgaccgagtacatcaaccccggcccggcccccgtctcttgctaa

SEQ ID NO: 208 - protein, 232 aa, Myceliophthora thermophila
MKFTSSLAVLAAAGAQAHYTFPRAGTGGSLSGEWEVVRMTENHYSHGPVTDVTSPEMTCYQSGVQGAPQTVQVKAGSQFTFSVDPSIGHPGPLQFYMAKVPSGQTAATFDGTGAVWFKIYQDGPNGLGTDSITWPSAGKTEVSVTIPSCIDDGEYLLRVEHIALHSASSVGGAQFYIACAQLSVTGGSGTLNTGSLVSLPGAYKATDPGILFQLYWPIPTEYINPGPAPVSC

SEQ ID NO: 209 - DNA, 854 bp, Myceliophthora thermophila
atgaaggccctctctctccttgcggctgcctcggcagtctctgcgcataccatcttcgtccagctcgaagcagacggcacgaggtacccggtctcgtacgggatccgggacccaagctacgacggccccatcaccgacgtcacatccaacgacgttgcttgcaacggcgggccgaacccgacgaccccctccagcgacgtcatcaccgtcaccgcgggcaccacggtcaaggccatctggaggcacaccctccaatccggcccggacgatgtcatggacgccagccacaagggcccgaccctggcctacctcaagaaggtcggcgatgccaccaaggactcgggcgtcggcggtggctggttcaagattcaggaggacggctacaacaacggccagtggggcaccagcaccgttatctccaacggcggcgagcactacatgtgagccattcctccgagagaagaccaagactcttgacgatctcgctgacccgtgcaacaagtgacatcccggcctgcatccccgagggtcagtacctcctccgcgccgagatgatcgccctccacgcggccgggtcccccggcggtgcccagctctacgtaagcctctgcccttccccccttcctcttgatcgaatcggactgcccaccccccttttcgactccgactaacaccgttgccagatggaatgtgcccagatcaacatcgtcggcggctccggctcggtgcccagctcgaccgtcagcttccccggcgcgtacagccccaacgacccgggtctcctcatcaacatctattccatgtcgccctcgagctcgtacaccatcccgggcccgcccgtcttcaagtgctag

SEQ ID NO: 210 - protein, 235 aa, Myceliophthora thermophila
MKALSLLAAASAVSAHTIFVQLEADGTRYPVSYGIRDPSYDGPITDVTSNDVACNGGPNPTTPSSDVITVTAGTTVKAIWRHTLQSGPDDVMDASHKGPTLAYLKKVGDATKDSGVGGGWFKIQEDGYNNGQWGTSTVISNGGEHYIDIPACIPEGQYLLRAEMIALHAAGSPGGAQLYMECAQINIVGGSGSVPSSTVSFPGAYSPNDPGLLINIYSMSPSSSYTIPGPPVFKC

SEQ ID NO: 211 - DNA, 1242 bp, Myceliophthora thermophila
atgaagtccttcgccctcaccactctggccgccctggccggcaacgccgccgctcacgcgaccttccaggccctctgggtcgacggcgtcgactacggcgcgcagtgtgcccgtctgcccgcgtccaactccccggtcaccgacgtgacctccaacgcgatccgctgcaacgccaacccgtcgcccgctcggggcaagtgcccggtcaaggccggctcgaccgttacggtcgagatgcatcaggtacgttggatgaatgaaaggggaaaggaagcagaggcagaaggggaaggcgaagggaaagaaaaagaaaaagaaatggaaaagaaaaagaaatggaaaagaaaaagaaaaatgaaaaagaaagtggaaaccgtcagactaactggggctcctcccccccacccctcctttgatatcagcaacccggtgaccggtcgtgcagcagcgaggcgatcggcggggcgcactacggccccgtcatggtgtacatgtccaaggtgtcggacgcggcgtcggcggacgggtcgtcgggctggttcaaggtgttcgaggacggctgggccaagaacccgtccggcgggtcgggcgacgacgactactggggcaccaaggacctgaactcgtgctgcgggaagatgaacgtcaagatccccgccgacctgccctcgggcgactacctgctccgggccgaggccctcgcgctgcacacggcgggcagcgccggcggcgcccagttctacatgacgtgctaccagctcaccgtgacgggctccggcagcgccagcccgcccaccgtctccttcccgggcgcctacaaggccaccgacccgggcatcctcgtcaacatccacgccccgctgtccggctacaccgtgcccggcccggccgtctactccggcggctccaccaagaaggccggcagcgcctgcaccggctgcgagtccacctgcgccgtcggctccggccccaccgccaccgtctcccagtcgcccggttccaccgccacctccgcccccggcggcggcggcggctgcaccgtccagaagtaccagcagtgcggcggcgagggctacaccggctgcaccaactgcgcggtacgtttttcaaccccgtttttttttttccttccctaccttatttggttacctaattaattactttccggctgctgactttttgctttagtccggctctacctgcagcgccgtctcgccgccctactactcgcagtgcgtctaa

SEQ ID NO: 212 - protein, 323 aa, Myceliophthora thermophila
MKSFALTTLAALAGNAAAHATFQALWVDGVDYGAQCARLPASNSPVTDVTSNAIRCNANPSPARGKCPVKAGSTVTVEMHQQPGDRSCSSEAIGGAHYGPVMVYMSKVSDAASADGSSGWFKVFEDGWAKNPSGGSGDDDYWGTKDLNSCCGKMNVKIPADLPSGDYLLRAEALALHTAGSAGGAQFYMTCYQLTVTGSGSASPPTVSFPGAYKATDPGILVNIHAPLSGYTVPGPAVYSGGSTKKAGSACTGCESTCAVGSGPTATVSQSPGSTATSAPGGGGGCTVQKYQQCGGEGYTGCTNCASGSTCSAVSPPYYSQCV

SEQ ID NO: 213 - DNA, 1253 bp, Myceliophthora thermophila
atgaagccttttagcctcgtcgccctggcgaccgccgtgagcggccatgccatcttccagcgggtgtcggtcaacgggcaggaccagggccagctcaagggggtgcgggcgccgtcgagcaactccccgatccagaacgtcaacgatgccaacatggcctgcaacgccaacattgtgtaccacgacagcaccatcatcaaggtgcccgcgggagcccgcgtcggcgcgtggtggcagcacgtcatcggcgggccgcagggcgccaacgacccggacaacccgatcgcggcctcccacaagggtatgatgatcgatgatgcctctctcttcccccgttcttgatggacaggcgatggctcccaggaacacgcgtgactgaccaccgaatccaggccccatccaggtctacctggccaaggtggacaacgcggcgacggcgtcgccgtcgggcctcaggtggttcaaggtggccgagcgcggcctgaacaacggcgtgtgggccgtcgatgagctcatcgccaacaacggctggcactacttcgacctgccgtcgtgcgtggcccccggccagtacctgatgcgcgtcgagctgctcgccctgcacagcgcctcaagccccggcggcgcccagttctacatgggctgcgcacagatcgaaggtgcgtcgatctttgttctccttccgtgtcctctctgatcctttctctcttctttttctttcttttactccctttccttccatcttcggagaagcaacgaagggggaaagggatagaagagaggaatgagagacgacgaaagagaggattggggaaagacaagacagggaaaaaaagacaagaaaaaaaaaaaaaaaaaaaaacagagtgagctaacaagaacaatcagtcactggctccggcaccaactcgggctccgactttgtctcgttccccggcgcctactcggccaacgatccgggcatcttgctaagcatctacgacagctcgggcaagcccaccaacggcgggcgctcgtacccgatccccggcccgcgccccatctcctgctccggcagcggcgacggcggcaacaacggcggcggcggcgacgacaacaacaataacaacggtggtggcaacaacggcggcggcggcggcggcagcgtccccctgtacgggcagtgcggcggcatcggctacacgggcccgaccacctgtgcccagggaacttgcaaggtgtcgaacgaatactacagccagtgcctcccctag

SEQ ID NO: 214 - protein, 310 aa, Myceliophthora thermophila
MKPFSLVALATAVSGHAIFQRVSVNGQDQGQLKGVRAPSSNSPIQNVNDANMACNANIVYHDSTIIKVPAGARVGAWWQHVIGGPQGANDPDNPIAASHKGPIQVYLAKVDNAATASPSGLRWFKVAERGLNNGVWAVDELIANNGWHYFDLPSCVAPGQYLMRVELLALHSASSPGGAQFYMGCAQIEVTGSGTNSGSDFVSFPGAYSANDPGILLSIYDSSGKPTNGGRSYPIPGPRPISCSGSGDGGNNGGGGDDNNNNNGGGNNGGGGGGSVPLYGQCGGIGYTGPTTCAQGTCKVSNEYYSQCLP

SEQ ID NO: 215 - DNA, 814 bp, Myceliophthora thermophila
atgaagctctccctcttctccgtcctggccactgccctcaccgtcgaggggcatgccatcttccagaaggtctccgtcaacggagcggaccagggctccctcaccggcctccgcgctcccaacaacaacaaccccgtgcaggatgtcaacagccaggacatgatctgcggccagtcgggatcgacgtcgaacactatcatcgaggtcaaggccggcgataggatcggtgcctggtatcagcatgtcatcggcggtgcccagttccccaacgacccagacaacccgattgccaagtcgcacaagggccccgtcatggcctacctcgccaaggttgacaatgccgcaaccgccagcaagacgggcctgaagtggtatgtattcccgcggcccgagggacatcgggttgggcaagtcgagactgacggagctcgcttctccgtataggttcaagatttgggaggatacctttaatcccagcaccaagacctggggtgtcgacaacctcatcaataacaacggctgggtgtacttcaacctcccgcagtgcatcgccgacggcaactacctcctccgcgtcgaggtcctcgctctgcactcggcctactctcagggccaggctcagttctaccagtcctgcgcccagatcaacgtatccggcggcggctccttcacaccgccgtcgactgtcagcttcccgggtgcctacagcgccagcgaccccggtatcctgatcaacatctacggcgccaccggccagcccgacaacaacggccagccgtacactgcccctgggcccgcgcccatctcctgctga

SEQ ID NO: 216 - protein, 246 aa, Myceliophthora thermophila
MKLSLFSVLATALTVEGHAIFQKVSVNGADQGSLTGLRAPNNNNPVQDVNSQDMICGQSGSTSNTIIEVKAGDRIGAWYQHVIGGAQFPNDPDNPIAKSHKGPVMAYLAKVDNAATASKTGLKWFKIWEDTFNPSTKTWGVDNLINNNGWVYFNLPQCIADGNYLLRVEVLALHSAYSQGQAQFYQSCAQINVSGGGSFTPPSTVSFPGAYSASDPGILINIYGATGQPDNNGQPYTAPGPAPISC

SEQ ID NO: 217 - DNA, 1115 bp, Thermoascus aurantiacus
atgtcgttctcgaagattgctgcgatcaccggggccattacctatgcgtctctggccgccgctcacggttatgttacaggaatcgtagccgatggcacctagtatgtaacgctcatgccaagatccgcattgctgtactaacaattagcagctacgggggctatatcgtgacccaatacccctacatgtcgacaccgccggatgtcatcgcctggtctaccaaagcaactgatcttggtttcgtggatcccagtagctatgcttcgtctgatattatctgccacaagggtgctgagcctggtgccctgagcgccaaggtggctgctggagggaccgtcgagctgcagtggacggattggcctgagagtcacaagggcccggtcattgactacctcgccgcctgtaacggggactgctcgactgtcgacaagaccaaactagagttcttcaagattgatgagagtggcctaattgacggcagcagcgccccaggcacatgggcctctgacaacttgattgccaataacaacagctggaccgtcaccatcccgagcacgattgctcccggcaactatgtcctgagacatgaaatcattgccctccactccgccggaaatacaaatggtgctcagaactacccccagtgtatcaaccttgaggtcacaggcagtggcaccgacacccctgccggcaccctcggaacggagctttataaggcaacggaccctggcattctggtcaacatctaccagaccctgaccagctacgatattcccggccctgctctgtacaccggtggtagctctggtagctctggttcctccaacaccgccaaggccaccacttcgacggcttctagctctatcgtgaccccgacgcctgttaacaacccaaccgttactcagactgccgttgttgatgtcacccagactgtttcccagaatgctgccgtcgccaccacgactccggcctccactgcagttgctacagctgtcccaacgggaaccacctttagctttgattcgatgacctcggatgaattcgtcagcctgatgcgtgcgaccgtgaattggctgctttctaacaagaagcatgcccgggatctttcttactaa

SEQ ID NO: 218 - protein, 354 aa, Thermoascus aurantiacus
MSFSKIAAITGAITYASLAAAHGYVTGIVADGTYYGGYIVTQYPYMSTPPDVIAWSTKATDLGFVDPSSYASSDIICHKGAEPGALSAKVAAGGTVELQWTDWPESHKGPVIDYLAACNGDCSTVDKTKLEFFKIDESGLIDGSSAPGTWASDNLIANNNSWTVTIPSTIAPGNYVLRHEIIALHSAGNTNGAQNYPQCINLEVTGSGTDTPAGTLGTELYKATDPGILVNIYQTLTSYDIPGPALYTGGSSGSSGSSNTAKATTSTASSSIVTPTPVNNPTVTQTAVVDVTQTVSQNAAVATTTPASTAVATAVPTGTTFSFDSMTSDEFVSLMRATVNWLLSNKKHARDLSY

SEQ ID NO: 219 - DNA, 862 bp, Aspergillus fumigatus
atgactttgtccaagatcacttccattgctggccttctggcctcagcgtctctcgtggctggccacggctttgtttctggcattgttgctgatgggaaatagtatgtgcttgaaccacacaaatgacagctgcaacagctaacttctattccagttacggagggtaccttgttaaccaatacccctacatgagcaaccctcccgacaccattgcctggtccaccaccgccaccgacctcggctttgtggacggcaccggctaccagtctccggatattatctgccacagagacgcaaagaatggcaagttgaccgcaaccgttgcagccggttcacagatcgaattccagtggacgacgtggccagagtctcaccatggaccggtacgacgccgaagagaagagaacatattgtgaccagataggctaacatagcatagttgattacttacctcgctccatgcaacggcgactgtgccaccgtggacaagaccaccctgaagtttgtcaagatcgccgctcaaggcttgatcgacggctccaacccacctggtgtttgggctgatgatgaaatgatcgccaacaacaacacggccacagtgaccattcctgcctcctatgcccccggaaactacgtccttcgccacgagatcatcgcccttcactctgcgggtaacctgaacggcgcgcagaactacccccagtgtttcaacatccaaatcaccggtggcggcagtgctcagggatctggcaccgctggcacgtccctgtacaagaatactgatcctggcatcaagtttgacatctactcggatctgagcggtggataccctattcctggtcctgcactgttcaacgcttaa

SEQ ID NO: 220 - protein, 250 aa, Aspergillus fumigatus [sequence omitted]

SEQ ID NO: 221 - DNA, 1021 bp, Penicillium pinophilum
atgccttctactaaagtcgctgccctttctgctgttctagctttggcctccacggttgctggccatggttttgtgcaaaacatcgttatcgacggtaaatcgtaagcagtgatgcatccattattaaactagacatgcttacaaaaaaatcagttactctggataccttgtgaatcagttcccctacgagtccaacccaccagctgttattgggtgggcaacaactgcaaccgacctgggattcgtcgctcccagtgagtacaccaatgcagacattatctgccacaagaacgccacacctggcgcgctttctgctccagttgctgcagggggcactgtcgagctccagtggactacatggcccgatagtcatcacggtcctgtcatcagctacctcgccaactgcaatggcaattgttctaccgtggataagactaagctagactttgtcaagattgaccaaggtggtttgatcgacgatactacccccccgggtacatgggcttccgacaaacttatcgctgccaacaacagctggactgtaactatcccctccaccatcgcgcctggaaactacgttttgcgccacgaaatcattgctcttcactccgctggaaacgcagacggtgcccaaaactaccctcaatgcatcaacttggagatcaccggcagcggaaccgccgctccctctggtaccgctggcgaaaagctctacacctctactgaccccggtatcttggtcaatatctaccaatccttgtcgacctacgttattcccggaccaactctgtggagcggtgctgccaatggcgctgttgccactggttctgctactgcggttgctacgactgccactgcttctgcgaccgctactcctaccacacttgttacctctgtcgctccagcttcatctacctttgccactgctgttgtgaccactgtcgctcctgcagtaactgatgtcgtgactgtcaccgatgtagttaccgtgaccaccgtcatcaccactactgtcctttga

SEQ ID NO: 222 - protein, 322 aa, Penicillium pinophilum
MPSTKVAALSAVLALASTVAGHGFVQNIVIDGKSYSGYLVNQFPYESNPPAVIGWATTATDLGFVAPSEYTNADIICHKNATPGALSAPVAAGGTVELQWTTWPDSHHGPVISYLANCNGNCSTVDKTKLDFVKIDQGGLIDDTTPPGTWASDKLIAANNSWTVTIPSTIAPGNYVLRHEIIALHSAGNADGAQNYPQCINLEITGSGTAAPSGTAGEKLYTSTDPGILVNIYQSLSTYVIPGPTLWSGAANGAVATGSATAVATTATASATATPTTLVTSVAPASSTFATAVVTTVAPAVTDVVTVTDVVTVTTVITTTVL

SEQ ID NO: 223 - DNA, 1486 bp, Thermoascus sp.
atgttgtcgttcgcttctgccaagtcagctgtgctgacgacccttctacttcttggatccgctcaggctcacactttgatgaccaccctgtttgtggatggcgtcaatcagggagatggtgtctgtattcgcatgaacaacaacggtagtactgccaacacctatatccagcctgtcacgagcaaggatattgcctgcggtaagtacagtaccggtccagatatcatactctatttcaatccgacaacagtcagagctggagagcaatgctaaacatccccaggcattcaaggcgaaattggcgccgctcgagtctgtccagccaaggcttcatccaccctcacgttccaattccgagagcagccatccaacccgaattccgctcctctcgatccctcgcacaaaggccccgctgcggtgtacctgaaaaaggtagactccgccatcgcgagcaacaacgccgctggagacggctggttcaagatctgggagtccgtctacgacgagtccacgggcaaatggggtacgaccaagatgatcgagaacaacgggcacatctctgtcaaggtccccgacgatatcgagggtgggtattatctcgcgcgtacggagcttctggcgctgcacgcggcgaacgaaggggatccgcagttctacgttggctgcgcgcagctgttcatcgattcagcggggacagcgaaaccgcctactgtctctattggagaggggacctacgatctgagcatgcctgccatgacgtacaatatctaccagactccgttggctctaccatacccgatgtatgggcctcctgtctacacacctggctctggctcgggttctggctctggttccgggtcagcttctgcaacgagatcttctgctattcctactgccaccgctgttacggactgttcttccgaagaggacagggaagactcagtcatggcaaccggtgttcccgttgcaagaagcacactcagaacctgggttgacagactgtcatggcatggtaaggcccgtgagaacgtgaaaccagccgccaggagaagcgcccttgtccagaccgagggtctgaagccggaaggctgcatcttcgtcaacggcaactggtgcggtttcgaggtccccgattacaacgatgcggaaagctgctgggctgtacgttcccgtctaattacttaaaacgaaataaaagctaacagtacttttctttttctaatcccaggcctccgacaactgctggaaacagtccgactcgtgctggaaccagacccagcccaccggctacaacaactgccagatctggcaagaccagaaatgcaagcccatccaggactcgtgtagccaatccaacccgactggaccgccgaacaagggcaaggatataactccaacgtggccgcccctggagggctcgatgaagaccttcaccaagcgcactgtcagttaccgtgattggattatgaaaaggaaaggagcataa

SEQ ID NO: 224 - protein, 444 aa, Thermoascus sp.
MLSFASAKSAVLTTLLLLGSAQAHTLMTTLFVDGVNQGDGVCIRMNNNGSTANTYIQPVTSKDIACGIQGEIGAARVCPAKASSTLTFQFREQPSNPNSAPLDPSHKGPAAVYLKKVDSAIASNNAAGDGWFKIWESVYDESTGKWGTTKMIENNGHISVKVPDDIEGGYYLARTELLALHAANEGDPQFYVGCAQLFIDSAGTAKPPTVSIGEGTYDLSMPAMTYNIYQTPLALPYPMYGPPVYTPGSGSGSGSGSGSASATRSSAIPTATAVTDCSSEEDREDSVMATGVPVARSTLRTWVDRLSWHGKARENVKPAARRSALVQTEGLKPEGCIFVNGNWCGFEVPDYNDAESCWAASDNCWKQSDSCWNQTQPTGYNNCQIWQDQKCKPIQDSCSQSNPTGPPNKGKDITPTWPPLEGSMKTFTKRTVSYRDWIMKRKGA

SEQ ID NO: 225 - DNA, 835 bp, Penicillium sp.
atgctgtcttcgacgactcgcaccctcgcctttacaggccttgcgggccttctgtccgctcccctggtcaaggcccatggctttgtccagggcattgtcatcggtgaccaattgtaagtccctctcttgcagttctgtcgattaactgctggactgcttgcttgactccctgctgactcccaacagctacagcgggtacatcgtcaactcgttcccctacgaatccaacccaccccccgtcatcggctgggccacgaccgccaccgacctgggcttcgtcgacggcacaggataccaaggcccggacatcatctgccaccggaatgcgacgcccgcgccgctgacagcccccgtggccgccggcggcaccgtcgagctgcagtggacgccgtggccggacagccaccacggacccgtcatcacctacctggcgccgtgcaacggcaactgctcgaccgtcgacaagacgacgctggagttcttcaagatcgaccagcagggcctgatcgacgacacgagcccgccgggcacctgggcgtcggacaacctcatcgccaacaacaatagctggaccgtcaccattcccaacagcgtcgcccccggcaactacgtcctgcgccacgagatcatcgccctgcactcggccaacaacaaggacggcgcccagaactacccccagtgcatcaacatcgaggtcacgggcggcggctccgacgcgcctgagggtactctgggcgaggatctctaccatgacaccgacccgggcattctggtcgacatttacgagcccattgcgacgtataccattccggggccgcctgagccgacgttctag

SEQ ID NO: 226 - protein, 253 aa, Penicillium sp.
MLSSTTRTLAFTGLAGLLSAPLVKAHGFVQGIVIGDQFYSGYIVNSFPYESNPPPVIGWATTATDLGFVDGTGYQGPDIICHRNATPAPLTAPVAAGGTVELQWTPWPDSHHGPVITYLAPCNGNCSTVDKTTLEFFKIDQQGLIDDTSPPGTWASDNLIANNNSWTVTIPNSVAPGNYVLRHEIIALHSANNKDGAQNYPQCINIEVTGGGSDAPEGTLGEDLYHDTDPGILVDIYEPIATYTIPGPPEPTF

SEQ ID NO: 227 - DNA, 878 bp, Thielavia terrestris
atgaagttctcactggtgtctctgctggcttacggcctctcggtcgaggcgcactccatcttccaggttcgtctcgcacatcacgctcaactcggctcgtggcgtaagggcaaggattaacacggccggcagagagtctcggtcaacggccaagaccaaggcctgctcaccggcctccgcgctccaagcaacaacaacccagtgcaagatgtcaacagccagaacatgatttgcggccagtcgggctccaagtcgcagaccgttatcaacgtcaaggccggcgacaggatcggctcgctctggcagcatgtcatcggcggcgcccagttttcgggtgacccggacaacccgatcgcccactcgcacaagggccccgtgatggcgtaccttgctaaggtcgacaatgccgcgtccgcgagccaaacgggtctgaagtggtaagtagcgggcgacgctcaggggacggggatcgggggcctgctccatccgagactaacaccgtggacaggttcaagatctggcaggacgggttcgataccagcagcaagacatggggcgtcgacaacctgatcaagaacaacggctgggtgtacttccacctgccgcagtgcctcgctccgggccagtatctcctgcgcgtcgaggttctggcgctgcactcggcgtaccagcagggccaggcccagttctaccagtcctgcgcccagatcaacgtctccggctccgggtccttcagcccgtcccagacggtcagcatcccgggcgtctacagcgccaccgacccgagcatcctcatcaacatctacggcagcacggggcagcccgacaacggcggcaaggcttacaacccccctggacccgccccgatctcctgctga

SEQ ID NO: 228 - protein, 246 aa, Thielavia terrestris
MKFSLVSLLAYGLSVEAHSIFQRVSVNGQDQGLLTGLRAPSNNNPVQDVNSQNMICGQSGSKSQTVINVKAGDRIGSLWQHVIGGAQFSGDPDNPIAHSHKGPVMAYLAKVDNAASASQTGLKWFKIWQDGFDTSSKTWGVDNLIKNNGWVYFHLPQCLAPGQYLLRVEVLALHSAYQQGQAQFYQSCAQINVSGSGSFSPSQTVSIPGVYSATDPSILINIYGSTGQPDNGGKAYNPPGPAPISC

SEQ ID NO: 229 - DNA, 1253 bp, Thielavia terrestris
atgaggacgacattcgccgccgcgttggcagccttcgctgcgcaggaagtggcaggccatgccatcttccaacagctctgggtggacggcaccgactatatacgtgctccccttttccttttgtgtttgcccatcctcgattgataacccgaggccatccaatgctgactcttacagcacggctcctcctgcgtccgcatgccgctgtcgaactcgcccgtcacgaacgtcggcagcagggacatgatctgcaacgccggcacgcgccccgtcagcgggaagtgccccgtcaaggccggcggcaccgtgacggttgagatgcaccaggtgggctgatttcctgagcgtcctattcctcccggaagcccctttcccatcctttgccctggctaacccctccgcccctcccagcaacccggggatcggtcgtgtaacaacgaagccatcggcggcgcccactggggaccggtgcaggtgtacctcagcaaggtggaggacgcgagcacggcggacgggtcgacgggctggttcaagatcttcgcggacacgtggtccaagaaggcgggcagctcggtgggggacgacgacaactggggcacgcgcgacctcaacgcgtgctgcggcaagatgcaggtcaagatcccggcggacatcccgtcgggcgactacctgctgcgggcggaggcgctggcgctgcacacggcgggccaggtgggcggcgcgcagttctacatgagctgctaccagatcaccgtgtcgggcggcggcagcgccagcccggccaccgtcaagttccccggcgcctacagcgccaacgacccgggcatccacatcaacatccacgcggccgtgtccaactacgtcgcgcccggcccggccgtctattccggcggcacgaccaaggtggccgggtccgggtgccaaggctgcgagaacacgtgcaaggtcggctcgtcgcccacggcgacggcgccgtcgggcaagagcggcgcgggttccgacggcggcgctgggaccgacggcgggtcttcgtcttcgagccccgacacgggcagcgcgtgcagcgtgcaggcctacgggcagtgcggcgggaacgggtactcgggttgcacccagtgcgcggtaagttcggggtcgtctgtcttttgtaggaacatccgagaggcttggctgacgaggcgttgttgtagcccggctatacttgcaaggcggtctctccgccgtactattcgcagtgcgccccttcttcttag

SEQ ID NO: 230 - protein, 334 aa, Thielavia terrestris
MRTTFAAALAAFAAQEVAGHAIFQQLWHGSSCVRMPLSNSPVTNVGSRDMICNAGTRPVSGKCPVKAGGTVTVEMHQQPGDRSCNNEAIGGAHWGPVQVYLSKVEDASTADGSTGWFKIFADTWSKKAGSSVGDDDNWGTRDLNACCGKMQVKIPADIPSGDYLLRAEALALHTAGQVGGAQFYMSCYQITVSGGGSASPATVKFPGAYSANDPGIHINIHAAVSNYVAPGPAVYSGGTTKVAGSGCQGCENTCKVGSSPTATAPSGKSGAGSDGGAGTDGGSSSSSPDTGSACSVQAYGQCGGNGYSGCTQCAPGYTCKAVSPPYYSQCAPSS

SEQ ID NO: 231 - DNA, 798 bp, Thielavia terrestris
atgaagctgagcgttgccatcgccgtgctggcgtcggctcttgccgaggctcactgtgagtgcatcgtctcactccagctactgcgaagcttgctgacgatggtccctagacaccttccccagcatcggaaacaccgctgactggcagtatgtgcggattacaacgaactaccagagcaacgggccggtgacggacgtcacctcggatcaaattcggtgctacgaacggaacccaggcacgggagcgcagggcatatacaacgtcaccgccggccagaccatcaactacaacgcgaaggcgtccatctcccacccggggcccatgtccttctacattgctaaggttcccgccggccaaaccgctgcgacctgggacggtaagggggctgtgtggaccaagatctaccaggacatgcccaagttcggcagcagcctgacctggcccaccatgggtaagaattctcaccctggaaatgaacgcacatttgcacagatctaacatggcctacaggcgccaagtctgtccccgtcaccatccctcgttgcctccagaacggcgattaccttctgcgagccgagcacatcgctctacacagcgcgagcagcgtcggtggcgcccagttctacctctcgtgcgcccagcttactgtcagcggcggcagtggcacctggaaccccaagaaccgggtctccttccccggcgcttacaaggcaacagacccgggcatcttgatcaacatctactaccccgtgccgaccagctactcgccgcccggcccgccggctgagacgtgctaa

SEQ ID NO: 232 - protein, 227 aa, Thielavia terrestris
MKLSVAIAVLASALAEAHYTFPSIGNTADWQYVRITTNYQSNGPVTDVTSDQIRCYERNPGTGAQGIYNVTAGQTINYNAKASISHPGPMSFYIAKVPAGQTAATWDGKGAVWTKIYQDMPKFGSSLTWPTMGAKSVPVTIPRCLQNGDYLLRAEHIALHSASSVGGAQFYLSCAQLTVSGGSGTWNPKNRVSFPGAYKATDPGILINIYYPVPTSYSPPGPPAETC

SEQ ID NO: 233 - DNA, 977 bp, Thielavia terrestris
atgaagctgtcatcccagctcgccgccctcacgctggccgcggcctccgtgtcaggccactacatcttcgagcagattgcccatggcggcaccaagttcccaccttacgagtacatccgaagaaacacgaactataacagccctgtcaccagtctctcgtcgaacgacctgcgatgcaacgtaggcggcgagacggctggcaacacgaccgtcctcgacgtgaaggcgggcgactccttcaccttctactcggacgtggccgtgtaccaccaggggcccatctcactgtgcgtgccccgggccaactttgatcagtcccaagcggactgtccgctcgcctggataaccacaattgactgacagcccgcacagctacatgtccaaggctcccggctccgtcgtggactacgacggctccggcgactggttcaagatccacgactggggcccgaccttcagcaacggccaggcctcgtggccgctgcggggtgcgtcccttccctttccctcccccttcctcccccttcctccccccctttccccccttttctgtctggtcgcacgccctgctgacgtccccgtagacaactaccagtacaacatcccgacgtgcatcccgaacggcgagtacctgctgcgcatccagtcgctggcgatccacaacccgggcgccacgccgcagttctacatcagctgcgcgcaggtccgggtctcgggcggcggcagcgcctccccctccccaacggccaagatccccggcgcgttcaaggcgaccgatcccgggtataccgcgaatgtgagtgccctatgttccttgcgctccttgttccttgctccttgctcggcgtgcttgaacgctacgggctgtggagggagggatggatggatgaataggatgctgactgatggtgggacaccagatttacaataacttccactcgtatacggtgccgggtccggcggtctttcagtgctag

SEQ ID NO: 234 - protein, 223 aa, Thielavia terrestris
MKLSSQLAALTLAAASVSGHYIFEQIAHGGTKFPPYEYIRRNTNYNSPVTSLSSNDLRCNVGGETAGNTTVLDVKAGDSFTFYSDVAVYHQGPISLYMSKAPGSVVDYDGSGDWFKIHDWGPTFSNGQASWPLRDNYQYNIPTCIPNGEYLLRIQSLAIHNPGATPQFYISCAQVRVSGGGSASPSPTAKIPGAFKATDPGYTANIYNNFHSYTVPGPAVFQC

SEQ ID NO: 235 - DNA, 1107 bp, Thielavia terrestris
atgccttctttcgcctccaagactctcctttccaccctggcgggtgccgcatccgtggccgcccacgggcacgtgtcgaacatcgtcatcaacggggtctcgtaccagggttacgatccgacctccttcccttacatgcagaacccgcccatcgtggtcggctggactgccgccgacacggacaacggctttgttgccccggatgccttcgccagtggcgatatcatctgccacaagaacgccaccaacgccaagggccacgccgtggtcgccgcgggagacaagatcttcatccagtggaacacatggcccgagtcccaccacggccccgtcatcgactacctcgcgagctgcggcagcgcgtcctgcgagaccgtcgacaagaccaagctcgagttcttcaagatcgacgaggtcggcctggtcgacggcagctcggcgcccggtgtgtggggctccgaccagctcatcgccaacaacaactcgtggctcgtcgagatcccgcccaccatcgcgccgggcaactacgtcctgcgccacgagatcatcgcgctgcacagcgccgaaaacgccgacggcgcccagaactacccgcagtgcttcaacctgcagatcaccggcaccggcaccgccaccccctccggcgtccccggcacctcgctctacaccccgaccgacccgggcatcctcgtcaacatctacagcgccccgatcacctacaccgtcccggggccggccctcatctccggcgccgtcagcatcgcccagtcctcctccgccatcaccgcctccggcaccgccctgaccggctctgccaccgcacccgccgccgccgctgctaccacaacttccaccaccaacgccgcggctgctgctacctctgctgctgctgctgctggtacttccacaaccaccaccagcgccgcggccgtggtccagacctcctcctcctcctcctccgccccgtcctctgccgccgccgccgccaccaccaccgcggctgccagcgcccgcccgaccggctgctcctctggccgctccaggaagcagccgcgccgccacgcgcgggatatggtggttgcgcgaggggctgaggaggcaaactga

SEQ ID NO: 236 - protein, 368 aa, Thielavia terrestris
MPSFASKTLLSTLAGAASVAAHGHVSNIVINGVSYQGYDPTSFPYMQNPPIVVGWTAADTDNGFVAPDAFASGDIICHKNATNAKGHAVVAAGDKIFIQWNTWPESHHGPVIDYLASCGSASCETVDKTKLEFFKIDEVGLVDGSSAPGVWGSDQLIANNNSWLVEIPPTIAPGNYVLRHEIIALHSAENADGAQNYPQCFNLQITGTGTATPSGVPGTSLYTPTDPGILVNIYSAPITYTVPGPALISGAVSIAQSSSAITASGTALTGSATAPAAAAATTTSTTNAAAAATSAAAAAGTSTTTTSAAAVVQTSSSSSSAPSSAAAAATTTAAASARPTGCSSGRSRKQPRRHARDMVVARGAEEAN

SEQ ID NO: 237 - DNA, 993 bp, Thielavia terrestris
atgccgcccgcactccctcaactcctaaccacggtcctgaccgccctcaccctcggttccaccgccctcgcccactcacacctcgcgtacattatcgttaacggcaagctctaccagggcttcgacccgcgcccgcaccaggccaactacccttcccgggtcgggtggtccaccggcgccgtcgacgacggcttcgtcacgccggccaactactccaccccggacatcatttgccacatcgccggcaccagcccggccggccacgcgcccgtgcgcccgggcgaccgcatccacgtccagtggaacggctggccggtcggccacatcggtcccgtgctgtcgtacctcgcccgctgcgagtcggacacgggctgcacgggccagaacaagaccgcgctgcggtggaccaagatcgacgactccagcccgaccatgcagaacgtcgccggcgcgggcacccagggcgagggcacccccggcaagcgctgggccaccgacgtgctgatcgccgccaacaacagctggcaggtcgccgtgccggcggggctgccgaccggcgcgtacgtgctgcgcaacgagatcatcgcgctgcactacgcggcgaggaagaacggggcgcagaactatccgctctgcatgaacctgtgggtggacgccagtggtgataatagtagtgtggctgcaacgacggcggcggtgacggcggggggtctgcagatggatgcgtatgacgcgcgcgggttctacaaggagaacgatccgggcgtgctggtcaatgtcacggccgcgctgtcgtcgtatgtcgtgcccgggccgacggtggcggcgggcgccacgccggtgccgtacgcgcagcagagcccgagcgtgtcgacggcggcgggcacgcccgtcgtcgttacaaggactagcgagacggcgccgtacacgggcgccatgacgccgacggttgcggcgaggatgaaggggagggggtatgatcggcggggttag

SEQ ID NO: 238 - protein, 330 aa, Thielavia terrestris
MPPALPQLLTTVLTALTLGSTALAHSHLAYIIVNGKLYQGFDPRPHQANYPSRVGWSTGAVDDGFVTPANYSTPDIICHIAGTSPAGHAPVRPGDRIHVQWNGWPVGHIGPVLSYLARCESDTGCTGQNKTALRWTKIDDSSPTMQNVAGAGTQGEGTPGKRWATDVLIAANNSWQVAVPAGLPTGAYVLRNEIIALHYAARKNGAQNYPLCMNLWVDASGDNSSVAATTAAVTAGGLQMDAYDARGFYKENDPGVLVNVTAALSSYVVPGPTVAAGATPVPYAQQSPSVSTAAGTPVVVTRTSETAPYTGAMTPTVAARMKGRGYDRRG

SEQ ID NO: 239 - DNA, 1221 bp, Thielavia terrestris
atgaagacattcaccgccctcctggccgcagccggcctcgtcgccggccatggatatgtcgacaacgccaccattggcggccagttttatcaggtactctaccgcttcacccaaggtccgctggccacaactctataggtgtcataaattaacaagccaccgtcccgcagttctatcaggtgtgctcgctaccgaccatgtggtcccgtctcagcaagccactcacacgcccatgatcccctagccttacgtcgacccgtatttagcaaccttggcacgtagtatttattgtcccaaatattgagctgaactgcacctccctagaatcccgcggtgctaacattctttcagcccgacagggtctctcgatccatcccgggcaacggcccggtcacggacgtcactctcatcgacctgcagtgcaacgccaattccaccccggccaagctccacgccactgccgctgccggctcggacgtgattctccgctggacgctctggcctgagtcgcacgttggccccgtcatcacctacatggcccgctgccccgacacgggctgccaggactggatgccgggcacttcgtaggagcccatcttgcaccatatccatttcaaccggccacacgcactgacccatatgtctgtctacccctgcagtgcggtctggttcaagatcaaggagggcggccgcgacggcacttccaacacctgggccgacgtacgtgtaccccgtcccagagagccaaagcccccccttcaacaaagcaaacatctcaatagcccgagcctacgcactaacccctctccttccccctcgaaaacacagaccccgctgatgacggcgcccacctcgtacacgtacacgatcccctcctgcctgaagaagggctactacctggtccgccacgagatcatcgcgctgcacgccgcctacacctaccccggcgcgcagttctacccgggctgccaccagctcaacgtcacgggcggcgggtccaccgtaccgtcgagcggcctggtggcctttcccggggcgtacaagggcagtgaccccgggattacgtacgatgcgtataaaggtgggttggctggttggcccaggtcttggtgatgggggaatgtggtgatgaggtttattatttgggatcccgtggctaacgtaaccctgggtgtagcgcaaacgtaccagattcctgggccggcggtctttacttgctga

SEQ ID NO: 240 - protein, 236 aa, Thielavia terrestris
MKTFTALLAAAGLVAGHGYVDNATIGGQFYQNPAVLTFFQPDRVSRSIPGNGPVTDVTLIDLQCNANSTPAKLHATAAAGSDVILRWTLWPESHVGPVITYMARCPDTGCQDWMPGTSAVWFKIKEGGRDGTSNTWADTPLMTAPTSYTYTIPSCLKKGYYLVRHEIIALHAAYTYPGAQFYPGCHQLNVTGGGSTVPSSGLVAFPGAYKGSDPGITYDAYKAQTYQIPGPAVFTC

SEQ ID NO: 241 - DNA, 933 bp, Thielavia terrestris
atggccttgctgctcttggcaggcttggccattctggccgggccggctcatgcccacggcggcctcgccaactacacagtgggcaacacctggtatagggggtgcgtaaggggggcaccgacaacgcctgcttagtaactccaccatttcgagcgggctaacaccgggcgcagctacgaccccttcacgccggcggccgaccagatcggccagccgtggatgatccaacgcgcgtgggactcgatcgacccgatcttcagcgtcaacgacaaggcgctcgcctgcaacaccccggccacggcgccgacctcttacattcccatccgcgcgggcgagaacatcacggccgtgtactggtactggctgcacccggtgggccccatgacggcgtggctggcgcggtgcgacggcgactgccgcgacgccgacgtcaacgaggcgcgctggttcaagatctgggaggccggcctgctcagcgggccgaacctggccgagggcatgtggtaccagaaggcgttccagaactgggacggcagcccggacctgtggcccgtcacgatcccggccgggctgaagagcggcctgtacatgatccggcacgagatcttgtcgatccacgtcgaggataaaccgcagttttatcccgagtgtgcgcatctgaatgtgaccgggggtggggacctgctgccgcctgatgagtttttggtgaagttcccgggcgcttacaaagaagatagtgagtgaaacgcgaagcttcggtagccattgggttgcgctgatggaggttagacccgtcgatcaagatcaatatctactcggaccagtacgccaatacaacggtgagtgtaacaggtcgagcaaaaccaaacagatgccgatgactgatgatctcagaattacacaattcccggagggccgatatgggatgggtga

SEQ ID NO: 242 - protein, 250 aa, Thielavia terrestris
MALLLLAGLAILAGPAHAHGGLANYTVGNTWYRGYDPFTPAADQIGQPWMIQRAWDSIDPIFSVNDKALACNTPATAPTSYIPIRAGENITAVYWYWLHPVGPMTAWLARCDGDCRDADVNEARWFKIWEAGLLSGPNLAEGMWYQKAFQNWDGSPDLWPVTIPAGLKSGLYMIRHEILSIHVEDKPQFYPECAHLNVTGGGDLLPPDEFLVKFPGAYKEDNPSIKINIYSDQYANTTNYTIPGGPIWDG

SEQ ID NO: 243 - DNA, 1584 bp, Thielavia terrestris
atgatgccgtcccttgttcgcttctcaatgggtctggcgaccgccttcgcctcgctgtccacagcacataccgtcttcaccacgcttttcatcaacggcgtcgaccaaggggacgggacctgcatccgcatggccaagaagggcagcgtttgcacccatcccattgctggtggcctcgacagcccagacatggcttgtggtatgccctctgcgtttcccctgcgagagctttcctcgagctaacccaatgccgcgttgcccaggccgagacggacaacaagccgtggcattcacctgcccagccccggcgggctccaagttgagcttcgagttccgcatgtgggccgacgcctctcagcccggctctatcgacccatcccacctcggctcgacggcaatctacctcaaacaagtctccaacatcagctccgactcggctgccggccctggctggttcaagatctacgccgagggctacgacacagccgccaagaagtgggccacagagaagctcatcgacaacggcggcctgctgagcatcgagcttccgcccactctgccggcgggatactacctcgcccgcagcgagatcgtcaccatccagaacgtcaccaacgaccacgtcgacccgcagttctacgttggctgcgcacagctcttcgtccaggggcctccgaccacccccaccgtcccgccagacagactcgtctccatcccgggccacgtccatgcctccgacccggggctgaccttcaacatctggcgcgacgacccctccaagacggcctacaccgtcgtcggcccggcccccttctcccccaccgccgcccccacccccacctccaccaacaccaacgggcagcaacaacaacaacagcaacaggcgataaagcagacggacggcgtgatccccgccgactgccagctcaagaacgccaactggtgcggcgccgaggtgcccgcgtacgccgacgaggccggctgctgggcgtcgtcggccgactgcttcgcccagctggacgcctgctacacgtcggcgccgcccacgggcagccgcggctgccggctgtgggaggactggtgcaccggcattcagcagggctgccgcgcggggcggtggcgggggccgccgccctttcatggggagggggcagcagcggaggtgtgaacggttcggggacgggtggcggtggtggtggtggtggtggtggcactggctcttcttcggcttctgccccgacggagacggcctctgctggccgggggggcgcaagaatagctgccgtggccggctgcggaggcgggacaggagacatggttgaagaggttttcctcttttattgggacgcttgcagcggctggcgacggagccgtggtggtggttcgattcttgcgaggcttatccttcatgtccttcttccacttttgagaccgaggcgagcccctcgagtccatttacttctcttccacctgtacctcaacttctgttatccaggaaccagtggtttctataatcgcctgagcattaaactaggcatatggccaagcaaaatgtcgcctgatgtagcgcattacgtgaaataa

SEQ ID NO: 244 - protein, 478 aa, Thielavia terrestris
MMPSLVRFSMGLATAFASLSTAHTVFTTLFINGVDQGDGTCIRMAKKGSVCTHPIAGGLDSPDMACGRDGQQAVAFTCPAPAGSKLSFEFRMWADASQPGSIDPSHLGSTAIYLKQVSNISSDSAAGPGWFKIYAEGYDTAAKKWATEKLIDNGGLLSIELPPTLPAGYYLARSEIVTIQNVTNDHVDPQFYVGCAQLFVQGPPTTPTVPPDRLVSIPGHVHASDPGLTFNIWRDDPSKTAYTVVGPAPFSPTAAPTPTSTNTNGQQQQQQQQAIKQTDGVIPADCQLKNANWCGAEVPAYADEAGCWASSADCFAQLDACYTSAPPTGSRGCRLWEDWCTGIQQGCRAGRWRGPPPFHGEGAAAETASAGRGGARIAAVAGCGGGTGDMVEEVFLFYWDACSGWRRSRGGGSILARLILHVLLPLLRPRRAPRVHLLLFHLYLNFCYPGTSGFYNRLSIKLGIWPSKMSPDVAHYVK

SEQ ID NO: 245 - DNA, 868 bp, Thielavia terrestris
atgcagctcctcgtgggcttgctgcttgcagccgtggctgctcgagcacattgtatttctacccctttccgcgtgcctcccagcctcaaggcaagaagacgcacgcagcagctaacggaccctatcagacacatttcccagactcgtggtaaatgggcagcccgaggacaaggactggtcggttacgcgcatgaccaagaacgcgcagagcaagcagggagtccaggacccgaccagtcccgacattcgctgctacacgtcgcagacggcgcctaacgtggctacggtccctgccggagccaccgtccattacatatcgactcagcagatcaaccacccgggcccgacgcagtactacctcgccaaggtaccggcggggtcgtcggccaagacgtgggacgggtcaggggccgtctggttcaagatctcgaccaccatgccttacttggacaacaacaagcagcttgtctggccgaatcagagtaggaacaattcccgctccaatcttcgatttggccttgagctacggccgattgcatgggagagaccgttgactgacggggcaacccaaccttcatcagacacgtacacgacggtcaacacgaccatccccgccgatacgcccagtggggaatacctcctccgggtcgagcagatcgcgctgcacctggcctcgcagcccaacggggctcagttctacctggcctgctcgcagatccagattacgggcggcggcaacggcacgcccggcccgctagtcgcgttgccgggggcgtacaagagcaacgacccgggcattttggtcaacatctactctatgcagcccggcgattacaagccgcccgggccgccggtgtggagtggctga

SEQ ID NO: 246 - protein, 230 aa, Thielavia terrestris
MQLLVGLLLAAVAARAHYTFPRLVVNGQPEDKDWSVTRMTKNAQSKQGVQDPTSPDIRCYTSQTAPNVATVPAGATVHYISTQQINHPGPTQYYLAKVPAGSSAKTWDGSGAVWFKISTTMPYLDNNKQLVWPNQNTYTTVNTTIPADTPSGEYLLRVEQIALHLASQPNGAQFYLACSQIQITGGGNGTPGPLVALPGAYKSNDPGILVNIYSMQPGDYKPPGPPVWSG

SEQ ID NO: 247 - DNA, 1068 bp, Thielavia terrestris
atgaagctgtacctggcggcctttctaggcgccgtcgccaccccgggagcgttcgctcatcgtaggttccccgtctatctccctaggggtagcaccacgactaatttctcgtcgtccccctgtagaaatccacgggattctacttgtcaacggcaccgaaacgccggaatggaaatacgtccggtaatatctaccttgctctccttcttccacaaccagcctaacacatcatcagtgacgtggcctgggagggcgcctacgaaccggaaaaataccccaacaccgagttctttaagacgcccccgcagacggacatcaacaacccgaacatcacctgcggcaggaacgcgttcgactcggccagcaagactgagacggccgacatactggccggctcagaggtcggcttccgcgtctcgtgggacggcaacggcaagtacggcgtgttctggcatcccgggccggggcagatctacctctctcgtgctccgaacgacgacctggaggactaccgcggcgacggagactggttcaagatcgcaaccggcgccgccgtctccaataccgagtggctgctgtggaacaagcatgacgtgagccccaacattcctcgcccaatcgatccccaacctggtcaccatggcggcgtccgggatgcaaagagactaactccagaggaacctacctagttcaacttcaccatccccaagacgacgccgccgggcaagtacctgatgcgcatcgagcagttcatgccctccacggtcgaatacagccagtggtacgtcaactgcgcccacgtcaacatcatcggccccggcggaggcacgccgacgggctttgccaggtttcccggcacctacactgttgacgatcccggtaagccggacctaccggacacagaggcctcgggatagcttgctaaccttgtttgctctctctctttttctctcccgactaggcatcaaggtgccgttgaaccagatcgtcaacagcggagagttgccgcaggaccaactgaggctgctcgagtacaagcccccgggcccagcgctgtggactggttga

SEQ ID NO: 248 - protein, 257 aa, Thielavia terrestris
MKLYLAAFLGAVATPGAFAHQIHGILLVNGTETPEWKYVRDVAWEGAYEPEKYPNTEFFKTPPQTDINNPNITCGRNAFDSASKTETADILAGSEVGFRVSWDGNGKYGVFWHPGPGQIYLSRAPNDDLEDYRGDGDWFKIATGAAVSNTEWLLWNKHDFNFTIPKTTPPGKYLMRIEQFMPSTVEYSQWYVNCAHVNIIGPGGGTPTGFARFPGTYTVDDPGIKVPLNQIVNSGELPQDQLRLLEYKPPGPALWTG

SEQ ID NO: 249 - DNA, 871 bp, Thermoascus crustaceus
atggccttttcccagataatggctattaccggcgtttttcttgcctctgcttccctggtggctggccatggctttgttcagaatatcgtgattgatggtaaaaggtacctaactacctaccttactatctgatgtcatttacaagaaagggcacagacacaagcggcaaaaaaaagaaagaaagaaagaaagaaagaaagctgacaaaaattcaacaagttatggcgggtacatcgtgaaccaatatccatacatgtcagatcctccggaggtcgtcggctggtctaccaccgcaaccgacctcggattcgtggacggtaccggataccaaggacctgatatcatctgccacaggggcgccaagcctgcagccctgactgcccaagtggccgccggaggaaccgtcaagctggaatggactccatggcctgattctcaccacggcccggtgatcaactaccttgctccttgcaacggtgactgttccaccgtggacaagacccaattgaaattcttcaagatcgcccaggccggtctcatcgatgacaacagtcctcctggtatctgggcctcagacaatctgatagcggccaacaacagctggactgtcaccatcccaaccacaactgcacctggaaactatgttctaaggcatgagatcattgctctccactcagctgggaacaaggatggtgcgcagaactatccccagtgcatcaacctgaaggtcactggaaatggttctggcaatcctcctgctggtgctcttggaacggcactctacaaggatacagatccgggaattctgatcaatatctaccagaaactttccagctatgttattcctggtcctgctttgtacactggttag

SEQ ID NO: 250 - protein, 251 aa, Thermoascus crustaceus
MAFSQIMAITGVFLASASLVAGHGFVQNIVIDGKSYGGYIVNQYPYMSDPPEVVGWSTTATDLGFVDGTGYQGPDIICHRGAKPAALTAQVAAGGTVKLEWTPWPDSHHGPVINYLAPCNGDCSTVDKTQLKFFKIAQAGLIDDNSPPGIWASDNLIAANNSWTVTIPTTTAPGNYVLRHEIIALHSAGNKDGAQNYPQCINLKVTGNGSGNPPAGALGTALYKDTDPGILINIYQKLSSYVIPGPALYTG

SEQ ID NO: 251 - DNA, 1102 bp, Thermoascus crustaceus
atgtcattctcgaagatacttgctatcgctggggccattacctacgcatcttcagctgccgctcatggttatgtccagggaattgttgtcgatggcagctagtatgtcactctggatggaaccttcagcacgtactgtactaacaatcagcagctacgggggatatatggtgacccaatatccctacaccgctcaacctccggaactcatcgcctggtccactaaagcaaccgatcttgggtttgtggacggcagtggctatacttctcctgatatcatctgccataagggtgctgagcctggtgcccagagcgccaaagtggcagctggagggaccgttgagctgcagtggacggcatggcccgagtctcacaagggcccagttattgactacctcgccgcctgcgacggggactgctcatctgttgataagactgcactaaagttctttaagattgacgagagtggtctgattgacggcaacggtgctggaacatgggcctctgatacgttgatcaaaaataacaacagctggactgtcaccatcccaagcacaattgcttccggaaactacgtactaagacacgaaataattgcgctccattctgccggaaacaaagatggtgctcagaactatccccagtgtatcaacctcgaggtcactggtagtggcaccgaaaaccctgctggcactctcggaacagcgctttacacagacactgatcctggccttctggtcaacatctaccagggtctgtccaactattcaatccctggtcctgctctgtatagcggcaacagtgataacgctggttccctcaaccctaccaccacgccgtcaattcagaatgctgctgctgctccctccacttccacagcatctgttgtcactgattcttcgtcagccacccagactgctagtgtcgccgccacgactccagcctccacttcggctgttacagcctcaccagctcccgatactggaagcgacgtaaccaaatatctggattcgatgagctcggatgaggtcctcaccctggtgcgcgggaccctgtcttggctggtttctaacaagaaacatgcgcgggatctttctcactga

SEQ ID NO: 252 - protein, 349 aa, Thermoascus crustaceus
MSFSKILAIAGAITYASSAAAHGYVQGIVVDGSYYGGYMVTQYPYTAQPPELIAWSTKATDLGFVDGSGYTSPDIICHKGAEPGAQSAKVAAGGTVELQWTAWPESHKGPVIDYLAACDGDCSSVDKTALKFFKIDESGLIDGNGAGTWASDTLIKNNNSWTVTIPSTIASGNYVLRHEIIALHSAGNKDGAQNYPQCINLEVTGSGTENPAGTLGTALYTDTDPGLLVNIYQGLSNYSIPGPALYSGNSDNAGSLNPTTTPSIQNAAAAPSTSTASVVTDSSSATQTASVAATTPASTSAVTASPAPDTGSDVTKYLDSMSSDEVLTLVRGTLSWLVSNKKHARDLSH

SEQ ID NO: 253 - DNA, 1493 bp, Thermoascus crustaceus
atgttgtcattcattcccaccaagtcagctgcgctgacgactcttctacttcttggaacagctcatgctcacactttgatgaccaccatgtttgtggacggcgtcaaccagggagatggtgtctgcattcgcatgaacaatgacggcggaactgccaatacctatatccagcctatcacgagcaaggatatcgcctgcggtaagtacccagatgtcatcatactctgccataacatccgtcatatctactagaatcggagcaatgttaagtatttccaggcatccaaggcgaaatcggcgcctcccgagtctgcccagtcaaggcatcttccaccctaaccttccaattccgcgagcaacccaacaacccaaactcctcccctctcgatccatcgcacaaaggccccgccgcggtgtacctgaaaaaggtcgactccgccatcgcgagcaacaacgccgccggagacagctggttcaagatctgggagtccgtctacgacgagtccacgggcaaatggggcacgaccaagatgatcgagaacaacgggcacatctccgtcaaggtgcccgatgatatcgagggtggttactatcttgcccggacggagctgctggcgctacattctgcggatcagggggatccgcagttctatgttggctgtgcgcagctgtttatcgattcggatgggacggcgaaaccgcccactgtttctattggagaggggacgtacgatctgagcatgcctgccatgacgtataatatctgggagacaccgttggctctgccgtatccgatgtatgggcctcctgtctatacgcctggctctggttctggatcagtccgtgcgacgagctcttctgctgtccctactgcaaccgaatcctcttttgtagaggaaagagcaaaccccgtcacggcaaacagtgtttattctgcaaggggcaaattcaaaacctggattgataaactgtcatggcgcgggaaggtccgtgagaacgtcagacaagccgcgggaagaagaagcactctcgtccagactgtgggtctaaagccaaaaggctgcatcttcgtcaatggaaactggtgcggcttcgaggttcccgactacaacgatgcggagagctgctgggctgtatgttcccctccttagcctcttacatccctaagtactacatttgaaaacaacaaaaagaaatgtatatactaactacgtacgctctactctaggcctccgacaactgctggaaacagtccgacgcctgctggaacaagacccaacccacgggctacaataactgccagatctggcaggacaagaaatgcaaggtcatccaggattcctgtagcggacccaacccgcatggaccaccgaataagggcaaggatttgactccggagtggccgccactgaagggctcgatggatacgttctccaagcgtactatcggttaccgcgattggattgttagaaggagaggtgcatgagggtgta

SEQ ID NO: 254 - protein, 436 aa, Thermoascus crustaceus
MLSFIPTKSAALTTLLLLGTAHAHTLMTTMFVDGVNQGDGVCIRMNNDGGTANTYIQPITSKDIACGIQGEIGASRVCPVKASSTLTFQFREQPNNPNSSPLDPSHKGPAAVYLKKVDSAIASNNAAGDSWFKIWESVYDESTGKWGTTKMIENNGHISVKVPDDIEGGYYLARTELLALHSADQGDPQFYVGCAQLFIDSDGTAKPPTVSIGEGTYDLSMPAMTYNIWETPLALPYPMYGPPVYTPGSGSGSVRATSSSAVPTATESSFVEERANPVTANSVYSARGKFKTWIDKLSWRGKVRENVRQAAGRRSTLVQTVGLKPKGCIFVNGNWCGFEVPDYNDAESCWAASDNCWKQSDACWNKTQPTGYNNCQIWQDKKCKVIQDSCSGPNPHGPPNKGKDLTPEWPPLKGSMDTFSKRTIGYRDWIVRRRGA

SEQ ID NO: 255 - DNA, 1035 bp, Aspergillus aculeatus
atgaagtatattcctctcgttattgcagttgctgccggcctggcacgtccggctactgcccactacatcttcagcaagctcgtgctgaacggagaggcatctgcggactggcaatacatccgcgagactactcgcagcatagtctatgagccgaccaagtacacctctaccttcgataacctaacacccagcgatagcgacttccgctgtaatctcggttccttcagcaatgctgcgaagaccgaggtcgctgaggttgcggcaggcgataccatcgcaatgaagctattctacgacaccagtattgcgcatcctggcccgggacaagtttatatgtccaaggcaccgaccggcaatgttcaggaataccaaggagacggggattggttcaaaatctgggaaaagaccctttgcaacacggatggtgatctgactacagaggcctggtgcacctggggcatgtcacagtttgaatttcaaatcccagctgcgaccccggcaggagagtacctagtgcgcgccgagcatataggcctgcatggcgctcaagcgaacgaggccgaattcttctacagctgtgcgcagatcaaggttacaggctcgggaactggatctcccagtctcacgtatcaaattcctggtctctataacgacactatgaccctgttcaatggcctcaatctttggactgattcagccgagaaggtgcagctggatttcctggagacgccaattggggacgacgtgtggagcggagcaggctcggggagcccatctgctgccacctcttcgaccagcggtgcaactcttgcagctcagggtacaactacctctgccgcgcatgctcaggcccagaccaccattaccaccagcaccagcaccatcacgtctctcgaatcagccagctcaaccgatctcgttgcgcagtatggtcagtgcggaggccttaactggtccggtccaaccgagtgtgagacaccttatacctgtgtgcagcagaacccttactaccatcaatgcgtgaattcgtgctga

SEQ ID NO: 256 - protein, 344 aa, Aspergillus aculeatus
MKYIPLVIAVAAGLARPATAHYIFSKLVLNGEASADWQYIRETTRSIVYEPTKYTSTFDNLTPSDSDFRCNLGSFSNAAKTEVAEVAAGDTIAMKLFYDTSIAHPGPGQVYMSKAPTGNVQEYQGDGDWFKIWEKTLCNTDGDLTTEAWCTWGMSQFEFQIPAATPAGEYLVRAEHIGLHGAQANEAEFFYSCAQIKVTGSGTGSPSLTYQIPGLYNDTMTLFNGLNLWTDSAEKVQLDFLETPIGDDVWSGAGSGSPSAATSSTSGATLAAQGTTTSAAHAQAQTTITTSTSTITSLESASSTDLVAQYGQCGGLNWSGPTECETPYTCVQQNPYYHQCVNSC

SEQ ID NO: 257 - DNA, 1203 bp, Aspergillus aculeatus
atgtctgttgctaagtttgctggtgttatcctcggttcggccgctctcgtcgctggccacggttacgtgtcgggtgctgttgtcgacggaacctactatggcggctacattgtcacttcctacccctattccagcgatcccccggagaccattggatggtctaccgaggcgaccgacttgggtttcgtcgatggtagcgagtatgctgatgccgacatcatttgccacaagagtgccaagcccggtgccatctctgctgaggtcaaggccggtggtactgttgagctccagtggactacctggcccgacagccaccacggccctgtcctgacctaccttgccaactgcaatggtgactgcagcagcgtcaccaagaccgacctcgagtttttcaagattgacgagagcggtctcatcaacgacgacgacgtccccggtacctgggccagtgataacttgatcgccaacaacaacagctggactgtgaccatcccctctgacattgcggctggcaactacgtcctccgtcacgaaatcattgcccttcactctgctggtaacaaggatggtgctcagaactaccctcagtgcctcaacttgaaggtcactggcggcggtgatctcgctccttctggcactgctggtgagagcctgtacaaggacaccgatgctggtatcctcgtcaacatctaccagtctctttcctcctacgatattcccggacctgctatgtacaacgctacctccagctcctccagctcctccagctccagctccagctccagctccagctccagctccggctcttccagctccgccgccgcctccagcagctccagcagctccagcactactgccgccgccgccgccgctaccagcgctgcttcttccgtcacctctgctgctggctccgtcgttactcagactgctaccgctgttgagactgatactgccactgcctaccagacctccactgaggttgcgcaagtcaccgtcaccggtagcgctccccagcagacctacgttgccactcccagcagctccagctctgcctccagcagctccagtgcttccgtatccaccagcaccagcctcaccagctacttcgagtccctgagcgctgatcagttcctcagcgttctcaagcagactttcacctggttggtcagcgagaagaagcacgcccgtgacctctccgcctaa

SEQ ID NO: 258 - protein, 400 aa, Aspergillus aculeatus
MSVAKFAGVILGSAALVAGHGYVSGAVVDGTYYGGYIVTSYPYSSDPPETIGWSTEATDLGFVDGSEYADADIICHKSAKPGAISAEVKAGGTVELQWTTWPDSHHGPVLTYLANCNGDCSSVTKTDLEFFKIDESGLINDDDVPGTWASDNLIANNNSWTVTIPSDIAAGNYVLRHEIIALHSAGNKDGAQNYPQCLNLKVTGGGDLAPSGTAGESLYKDTDAGILVNIYQSLSSYDIPGPAMYNATSSSSSSSSSSSSSSSSSSSGSSSSAAASSSSSSSSTTAAAAAATSAASSVTSAAGSVVTQTATAVETDTATAYQTSTEVAQVTVTGSAPQQTYVATPSSSSSASSSSSASVSTSTSLTSYFESLSADQFLSVLKQTFTWLVSEKKHARDLSA

SEQ ID NO: 259 - DNA, 1170 bp, Aspergillus aculeatus
atgaagtcctctactttcggtatgctcgctctggcagcagcagccaagatggtcgatgcccacaccaccgtcttcgccgtctggatcaacggcgaggaccagggtctgggcaacagtgccagtggctacatccggtctccccccagcaacagccccgtcaaggacgtgacctcgaccgacatcacctgcaacgtcaacggcgaccaggcggcggctaagaccctctccgtcaagggcggcgacgtcgtcaccttcgagtggcaccacgacagccgggacgcctccgacgacatcatcgcctcctcccacaagggccccgtcatggtctacatggccccgaccaccgccggcagcagcggcaagaactgggtcaagatcgccgaggacggatactccgacggcacctgggccgtcgacaccctgatcgccaacagcggcaagcacaacatcaccgtccccgacgtccccgccggcgactacctcttccgcccggagatcatcgccctccacgaggccgagaacgagggcggcgcccagttctacatggagtgtgtccagttcaaggtcacctccgacggtgccaacactctgcccgacggtgtcagcctgcccggcgcctactccgccactgaccccggtatcctcttcaacatgtacggctccttcgacagctatcccatccccggtccctccgtctgggatggcactagctctggctcttcctcttcttcctcttcttcctcttccagctcttccgccgccgctgccgttgttgccacctcctcttcctcttcctctgcttccatcgaggccgtgaccaccaagggtgccgtcgccgccgtctccaccgccgccgccgtggctcctaccaccaccaccgctgcccccaccaccttcgccacggccgtcgcctccaccaagaaggccactgcctgccgcaacaagaccaagtcctcctccgctgccaccaccgccgccgccgtcgccgagaccacctcttccaccgctgccgccaccgctgctgcttcctctgcctcttccgcctccggcaccgccggcaagtacgagcgctgcggtggccagggctggaccggtgccaccacctgcgttgatggctggacctgcaagcagtggaacccttactactaccagtgcgttgagtctgcctag

SEQ ID NO: 260 - protein, 389 aa, Aspergillus aculeatus
MKSSTFGMLALAAAAKMVDAHTTVFAVWINGEDQGLGNSASGYIRSPPSNSPVKDVTSTDITCNVNGDQAAAKTLSVKGGDVVTFEWHHDSRDASDDIIASSHKGPVMVYMAPTTAGSSGKNWVKIAEDGYSDGTWAVDTLIANSGKHNITVPDVPAGDYLFRPEIIALHEAENEGGAQFYMECVQFKVTSDGANTLPDGVSLPGAYSATDPGILFNMYGSFDSYPIPGPSVWDGTSSGSSSSSSSSSSSSSAAAAVVATSSSSSSASIEAVTTKGAVAAVSTAAAVAPTTTTAAPTTFATAVASTKKATACRNKTKSSSAATTAAAVAETTSSTAAATAAASSASSASGTAGKYERCGGQGWTGATTCVDGWTCKQWNPYYYQCVESA

SEQ ID NO: 261 - DNA, 1221 bp, Aspergillus aculeatus
atgcgtcaggctcagtctttgtccctcttgacagctcttctgtctgccacgcgtgtggctggacacggtcacgtcactaacgttgtcgtcaacggtgtttactacgagggcttcgatatcaacagcttcccctacgagtccgatccccctaaggtggcggcttggaccactcctaacactggcaacggtttcatttcccccagcgactacggtaccgatgacattatttgccaccagaatgccaccaacgcccaggcccacattgttgttgcggctggtgacaagatcaacatccagtggaccgcgtggcccgattcccaccacggtcctgtccttgactacctcgctcgctgcgacggtgagtgtgagacggttgataagaccactcttgagtttttcaagatcgacggcgtcggtctcatcagtgacaccgaagtgcccggtacctggggagatgaccagctgatcgccaacaacaacagctggttggtcgagatccccccgaccattgctcctggcaactatgttcttcgccacgagcttatcgctctccacagcgccggcactgaagatggtgctcagaactacccccagtgtttcaacctccaggtcactggctccggtactgacgagcccgctggtaccctcggcaccaagctctacactgaggatgaggctggtatcgttgtgaacatctacacctctctgtcttcctatgccgtccccggccccacccagtacagcggcgccgtctctgtcagccaatccacttcggccattacctccaccggaactgctgttgtcggtagcggcagcgctgttgccacctctgccgccgcggctaccaccagcgctgctgcttcttctgccgctgctgctaccaccgctgctgccgttaccagcgccaatgccaacactcagattgcccagcccagcagcagctcttcttactcccagatcgccgtgcaggtgccctcctcctggaccacccttgtgaccgtcactcctcccgccgccgccgccaccacccctgctgccgtccctgagcctcagaccccctctgccagctctggagccaccactaccagcagcagcagcggcgccgcccagtctctctacggccagtgcggtggtatcaactggaccggagctacctcttgcgttgagggcgctacttgctaccagtacaacccttactactaccagtgcatctctgcctaa

SEQ ID NO: 262 - protein, 406 aa, Aspergillus aculeatus
MRQAQSLSLLTALLSATRVAGHGHVTNVVVNGVYYEGFDINSFPYESDPPKVAAWTTPNTGNGFISPSDYGTDDIICHQNATNAQAHIVVAAGDKINIQWTAWPDSHHGPVLDYLARCDGECETVDKTTLEFFKIDGVGLISDTEVPGTWGDDQLIANNNSWLVEIPPTIAPGNYVLRHELIALHSAGTEDGAQNYPQCFNLQVTGSGTDEPAGTLGTKLYTEDEAGIVVNIYTSLSSYAVPGPTQYSGAVSVSQSTSAITSTGTAVVGSGSAVATSAAAATTSAAASSAAAATTAAAVTSANANTQIAQPSSSSSYSQIAVQVPSSWTTLVTVTPPAAAATTPAAVPEPQTPSASSGATTTSSSSGAAQSLYGQCGGINWTGATSCVEGATCYQYNPYYYQCISA

SEQ ID NO: 263 - DNA, 1284 bp, Aspergillus aculeatus
atgtctctttccaagattgccactcttctgctgggctcggtctcgctggtcgctggtcatgggtatgtctcgagcatcgaggtggacggtaccacctatggagggtacttggtcgacacttattactacgaatccgacccgcccgagttaatcgcctggtccacaaatgccacggatgatggctatgtatcgccctccgactacgagagcgtgaacatcatctgccacaaggggtctgcgcccggcgcgttgtcggcccctgtcgcgcccggaggctgggtgcagatgacctggaacacctggcccaccgaccatcacggccctgtcatcacgtatatggccaattgccacggttcttgcgcagatgtggacaagaccaccctcgagttcttcaagatcgatgctggcggcttgatcgatgacacggacgtgcctggaacttgggcgaccgatgagctcattgaagatagctatagtcgcaacatcactatccccagcgatattgcccccgggtactatgttttgcgacacgagatcattgctctgcacagcgccgagaacctggacggagcccagaactacccccagtgcatcaatctggaagtcaccggcagcgagacagcaaccccgagtggcaccttgggcactgctctgtacaaggagaccgaccccggcatctatgttgacatctggaacacgttgagcacgtatactattcccggccccgcgctgtacactgctggtagcactgcgaccgcagccgctgctgccgataccaccactacttctgctggcaccaccgctgaggccaccaccgctgccgccgccgtgagtaccaccgcggacgctgttccgaccgagtcttcagctccttccgagaccagcgcgactaccgcgaaccctgctcggcccactgccggcagcgacatccgcttccagcccggtcaggtcaaggctggtgcttcagtcaacaactcggctactgagacttcctctggtgagtctgccacgacgaccacaacatcagtggccactgcggcttcgagcgcggattcgtcgacgacttctggggttttgagtggcgcctgcagccaggagggctactggtactgcaacgggggcactgcgttccagcgctgtgtcaacggggaatgggatgcgtcccagagtgtggctgcgggcacggtctgcaccgccggtatctcggagaccatcaccatttcagccgccgccacgcgccgggatgccatgcgtcgtcatctggcgcgtcccaagcgtcactga

SEQ ID NO: 264 - protein, 427 aa, Aspergillus aculeatus
MSLSKIATLLLGSVSLVAGHGYVSSIEVDGTTYGGYLVDTYYYESDPPELIAWSTNATDDGYVSPSDYESVNIICHKGSAPGALSAPVAPGGWVQMTWNTWPTDHHGPVITYMANCHGSCADVDKTTLEFFKIDAGGLIDDTDVPGTWATDELIEDSYSRNITIPSDIAPGYYVLRHEIIALHSAENLDGAQNYPQCINLEVTGSETATPSGTLGTALYKETDPGIYVDIWNTLSTYTIPGPALYTAGSTATAAAAADTTTTSAGTTAEATTAAAAVSTTADAVPTESSAPSETSATTANPARPTAGSDIRFQPGQVKAGASVNNSATETSSGESATTTTTSVATAASSADSSTTSGVLSGACSQEGYWYCNGGTAFQRCVNGEWDASQSVAAGTVCTAGISETITISAAATRRDAMRRHLARPKRH

SEQ ID NO: 265 - DNA, 804 bp, Aspergillus aculeatus
atgcttgtcaaactcatctcttttctttcagctgctaccagcgtagctgctcatggtcatgtgtcaaacattgtgatcaacggggtgtcctaccgcggatgggacatcaattcggacccttacaattccaaccctccggtggtggttgcatggcaaacacccaacacagctaatggcttcatctcccctgatgcatacgacacagatgatgttatttgccatctgagcgctacgaatgccagaggccacgcagtcgtcgctgctggcgacaagatcagcctccagtggacgacctggcctgacagtcaccatggccctgtcatcagctacctagccaactgcggctccagctgcgagacagtcgataagaccaccctcgagttcttcaagatcgatggtgttggcttggtggatgagagcaatccccctggtatctggggagacgatgagctcattgccaacaacaactcttggctggtagagattccagctagtatcgcgccaggatactatgtgctgcgtcacgagttgatcgctctgcatggagcagggagtgagaatggagcccagaattacatgcaatgtttcaaccttcaggttactgggactggcacggtccagccttccggggtcctgggcacggagctgtacaaacccacagacgctggaattcttgtcaatatctaccagtcgctctccacctatgttgttcctggcccgaccctgatcccccaggccgtttccctcgttcagtcgagctccaccattaccgcctcgggcacggcagtgacaaccacggcttga

SEQ ID NO: 266 - protein, 267 aa, Aspergillus aculeatus
MLVKLISFLSAATSVAAHGHVSNIVINGVSYRGWDINSDPYNSNPPVVVAWQTPNTANGFISPDAYDTDDVICHLSATNARGHAVVAAGDKISLQWTTWPDSHHGPVISYLANCGSSCETVDKTTLEFFKIDGVGLVDESNPPGIWGDDELIANNNSWLVEIPASIAPGYYVLRHELIALHGAGSENGAQNYMQCFNLQVTGTGTVQPSGVLGTELYKPTDAGILVNIYQSLSTYVVPGPTLIPQAVSLVQSSSTITASGTAVTTTA

SEQ ID NO: 267 - DNA, 822 bp, Aspergillus aculeatus
atgaagtatcttgcgatcttcgcggcagcagcagctggactggcccgcccgacagcagcgcactacatcttcagcaagctgattctggacggcgaagtctctgaggactggcagtatattcgtaaaaccacccgggagacatgctatttgccgaccaagttcaccgacaccttcgacaacttgactccgaacgaccaggatttccggtgcaatctcggctcgttcagcaacgccgccaagaccgaagtggccgaggtggaagcgggctccacgattggcatgcagcttttcgctggtagccacatgcgtcacccgggacctgcgcaagtcttcatgtctaaggccccgtccggcaacgtacagagctacgagggtgacggctcctggttcaagatctgggagcgtacactctgcgacaaaagtggcgatctgactggagatgcgtggtgtacatacggccagaccgagatcgagtttcaaatccccgaggcgaccccgacgggcgaatacctggtccgagcggagcacatcggtcttcaccgcgcacagagtaatcaagccgagttctactacagctgcgcccaggtcaaggtcacgggcaatggtaccggggtgccgagccagacatatcagatccctggcatgtacaatgaccgctcggagcttttcaacgggctgaacttgtggtcctactcggtggagaacgtcgaggcagccatgaagaattctatcgtgggtgatgaaatttggaatggaagttctgttccctctgagtcccatgtcccgaagtataagaagagtcatgcttgtcgtgtttattga

SEQ ID NO: 268 - protein, 273 aa, Aspergillus aculeatus
MKYLAIFAAAAAGLARPTAAHYIFSKLILDGEVSEDWQYIRKTTRETCYLPTKFTDTFDNLTPNDQDFRCNLGSFSNAAKTEVAEVEAGSTIGMQLFAGSHMRHPGPAQVFMSKAPSGNVQSYEGDGSWFKIWERTLCDKSGDLTGDAWCTYGQTEIEFQIPEATPTGEYLVRAEHIGLHRAQSNQAEFYYSCAQVKVTGNGTGVPSQTYQIPGMYNDRSELFNGLNLWSYSVENVEAAMKNSIVGDEIWNGSSVPSESHVPKYKKSHACRVY

SEQ ID NO: 269 - DNA, 969 bp, Aurantiporus alborubescens
atgcgaaccatcgccacgtttgttacgcttgtagcctcagttctccctgcggtcctcgcacacggaggtgtcctctcctattcsaacggggggaattggtactggggatggaagccttacaattcacctgacgggcagaccaccatccaacgcccgtgggcaacatacaatccgatcactgatgcgacggatcctaccattgcttgcaacaacgacgggacatctggagctctgcagttgactgcgacagtcgcggcgggatctgccatcacggcgtattggaaccaggtgtggccgcatgataaagggccgatgacgacatacctcgcacaatgccccggcagtacctgcacaggagtcaacgcgaagactctgaaatggttcaagatcgatcacgccgggttgctttctggtactgtctacagtggctcgtgggcatcaggcaagatgattgcacagaactcgacctggacaactaccattccagcgacggtgccttcagggaactatctgatacgtttcgagactattgccctgcactctttgccagcgcaattttaccctgagtgcgcacaaattcaaatcacgggcggaggttcccgtgctccaaccgctgcagagcttgttagcttccctggcgcgtacagcaacaatgatcctggtgtcaacattgacatctactccaatgccgcgcagagtgcaaccacatacgtaataccaggacctccattgtacggcggtgcttccggatctggtccatcttccgcgcctccatcaagtaccccaggtagttcgtccacttcccacggtcccacgtccgtcagcacgtccagcagtgctgcaccatcgacgacaggaaccgtgacgcagtacggtcagtgcggtggcattggttgggctggagctaccggctgtatctcaccattcaagtgcacggtcatcaacgattattactaccagtgcctctga

SEQ ID NO: 270 - protein, 322 aa, Aurantiporus alborubescens
MRTIATFVTLVASVLPAVLAHGGVLSYSNGGNWYWGWKPYNSPDGQTTIQRPWATYNPITDATDPTIACNNDGTSGALQLTATVAAGSAITAYWNQVWPHDKGPMTTYLAQCPGSTCTGVNAKTLKWFKIDHAGLLSGTVYSGSWASGKMIAQNSTWTTTIPATVPSGNYLIRFETIALHSLPAQFYPECAQIQITGGGSRAPTAAELVSFPGAYSNNDPGVNIDIYSNAAQSATTYVIPGPPLYGGASGSGPSSAPPSSTPGSSSTSHGPTSVSTSSSAAPSTTGTVTQYGQCGGIGWAGATGCISPFKCTVINDYYYQCL

SEQ ID NO: 271 - DNA, 705 bp, Aurantiporus alborubescens
atgaaggctatcttggctattttctcggcccttgctccacttgccgctgcgcattataccttccctgattttattgtcaacggaacaacaactgccgattgggtctacatccgagagaccgcgaaccactactcgaatggtcctgtaaccaacgtgaacgatccagaattccgatgctacgagctggacctgcaaaacacggcagcgagtaccctcaccgccacggtctctgcaggctccagcgtcggctttaaagctaacagcgccctttaccatcctggttatctcgatgtgtatatgtccaaagcgaccccagctgctaattcacccagtgctggaacggaccaaagctggttcaaggtctatgaatccgctccggtcttcgcgaatggggccctaagcttcccttcggagaacatccaatctttcacgttcacaatcccgaagtcccttcccagtggccaatatctcatccgtgtggaacacatcgctctccactccgccagtagctacggaggtgcacaattctacatcagctgcgctcaagtcaatgtcgtcaacggcgggaacggaaacccaggaccgttagtcaagattcccggcgtttacactgggaacgagcctggcatcctcatcaacatctacagcttcccaccgggtttcagtggctaccaatccccgggacctgctgtgtggcgtggttga

SEQ ID NO: 272 - protein, 234 aa, Aurantiporus alborubescens
MKAILAIFSALAPLAAAHYTFPDFIVNGTTTADWVYIRETANHYSNGPVTNVNDPEFRCYELDLQNTAASTLTATVSAGSSVGFKANSALYHPGYLDVYMSKATPAANSPSAGTDQSWFKVYESAPVFANGALSFPSENIQSFTFTIPKSLPSGQYLIRVEHIALHSASSYGGAQFYISCAQVNVVNGGNGNPGPLVKIPGVYTGNEPGILINIYSFPPGFSGYQSPGPAVWRG

SEQ ID NO: 273 - DNA, 702 bp, Trichophaea saccata
atgacgcccctgaaactccgcccccttctcctcctggtgctttccacgaccctcagcctcgtgcacgcgcactatcgcttctacgaactgatcgccaacggggccacccacgcttccttcgaatacatccgccaatgggtgcccatctacagcaactctcccgtaaccgacgtcaccagcgtcaacctccgctgcaacgtcaacgccactcccgccgccgaggtgatcaccgttgctgccggtagcaccgtcggcttcgtagcagacacaacagtaacgcaccccggtgcgttcaccgcgtacatggcgaaagcgcccgaagacatcacggaatgggatggcaacggggactggttcaagatctgggagaagggtccaacgagtataaccagtagcgggataacctgggacgtcacggatacccaatggaccttcaccatcccttccgcgacaccaaacggtcaatacctactccgcttcgagcacatagcgctccacgccgccagcaccgtggggggtgctcaattctacatgtcgtgcgcgcagatacaagtaacgaacggcggcaacgggagtcccgggcccaccatcaagttcccgggcggatacagcgccacagaccccggtatcctgatcaatatctattatcccatccccactagttacactattcctggtccaccggtttggaccggtaagtaa

SEQ ID NO: 274 - protein, 233 aa, Trichophaea saccata
MTPLKLRPLLLLVLSTTLSLVHAHYRFYELIANGATHASFEYIRQWVPIYSNSPVTDVTSVNLRCNVNATPAAEVITVAAGSTVGFVADTTVTHPGAFTAYMAKAPEDITEWDGNGDWFKIWEKGPTSITSSGITWDVTDTQWTFTIPSATPNGQYLLRFEHIALHAASTVGGAQFYMSCAQIQVTNGGNGSPGPTIKFPGGYSATDPGILINIYYPIPTSYTIPGPPVWTGK

SEQ ID NO: 275 - DNA, 714 bp, Trichophaea saccata
atgaaatgccttctctccctccttctcgccgcgacagcggtctccgctcacacgatcttccaagaaatcggcataaacggggtgatgcaagctcgctacgactacatgcggctgccgtcctacgacggtcccattacggacgtaacgagcacctacatggcgtgcaacggtggtcccaatccattggtccaaatctcgaacgacgtcgctttcgtaaaagccggcgacagcatcacgctgcaatgggcgcaaacgttgacgacagatttcaacacggggctgatcatcgatccatcgcacttgggtcctgtgatggtctacatggccaaagtaccctccgccaccggtccgatccccaacagcggctggttcaaaatctacgaagacggctacgacccgacaacaaagacatgggcggtaaccaagctcatcaacaacaagggaaaagtgaccgtcaccatcccatcgtgtctaccggcaggggactacttgctgcgcggtgaaatcattgccttgcacgcggctagtacctatccaggcgcacagttttacatggagtgtgcgcagttgcggcttaccagtggcggcactaagatgcctaccacgtataacattccggggatctattcgcccactgatccgggtgttacgttcaatctttacaatggattcacgagttataccattcctggcccaaggccgtttacatgctag

SEQ ID NO: 276 - protein, 237 aa, Trichophaea saccata
MKCLLSLLLAATAVSAHTIFQEIGINGVMQARYDYMRLPSYDGPITDVTSTYMACNGGPNPLVQISNDVAFVKAGDSITLQWAQTLTTDFNTGLIIDPSHLGPVMVYMAKVPSATGPIPNSGWFKIYEDGYDPTTKTWAVTKLINNKGKVTVTIPSCLPAGDYLLRGEIIALHAASTYPGAQFYMECAQLRLTSGGTKMPTTYNIPGIYSPTDPGVTFNLYNGFTSYTIPGPRPFTC

SEQ ID NO: 277 - DNA, 1455 bp, Penicillium thomii
atgtctctgtctaagatttctggattgatcctcggatctgctgccttggtggctggccacggttacgtgagcggaatcgtcgttgacgatacctactatggtggataccttgtcacccagtacccttatgagagtgacgccccagagctcattgcctggtcggagcaagagaccgatctgggttacatcgatggctctgagtatgccaactccaacatcatctgtcacaaggaggccaaacctggtgctttggaagcacccgttaaggctggtggctccgtcgagctccagtggaccacttggcctaccagccaccacggtcctgtcattacctacatggccaactgtaacggcgactgtgacgacgttgacaagactactttgcagttcttcaagattgaccagggtggtttgatcagcgataccaccgagcccggtacctgggcaactgacaacctcatcgccaacaacaatagccgtactgtcaccgtccccagcgacattgccgatggaaactacgtcctccgtcacgagatcattgccctccactccgccggggagaccaacggtgcccagaactacccccaatgtatcaacttgaaggtcactggcggcggtagcgctactccttctggtaccctgggtaccgccctgtacaagaacaccgaccccggtatcctgatcaacatctacacttccctcagcacctacgatatccccggcccaaccctgtacactgccggcgccgccgctgctaccgctgcctccacggctgcctcttccaccgccgctgccgttactactgccgacgccgtcactaccgccgctgccgtcaccagcagctctgcatccgtggaagttgtgcccacaactactcccagctcatcaatcgtcagtgccttcccaacctggagcccctcttctaccccacccttctccaactcttccaacggatggcgtccgtcattcagccgcggacctggtggcccccgcttcacatctgctcctgctcctcagttctccgctcctagcggcgctcagcagaagcagtctgccactgctacccccatcgtggctacccctgtcgtgatcaccatgaccgagaccagcacctcctgggtcaccgaaatggttactcttactgacaagtctgttgtgcagaccaccagcgctgtcccagtcgtcgtcgccgccaccactacccttaccgagggaagcgagcctgctcagacagcctcccccagcgttgtctccggctcctctagctccggctctagctcctcatctaccaccaccacctcaaagacctcaactggatccgactacgtctccagcgactggatgtcttacctcagctccttgagcgctgctgaggtcctccagatgctgcgccagaccttccgttggatggtcagcaacgacaaggtgcacgctcgtgatattaccatcaactag

SEQ ID NO: 278 - protein, 484 aa, Penicillium thomii
MSLSKISGLILGSAALVAGHGYVSGIVVDDTYYGGYLVTQYPYESDAPELIAWSEQETDLGYIDGSEYANSNIICHKEAKPGALEAPVKAGGSVELQWTTWPTSHHGPVITYMANCNGDCDDVDKTTLQFFKIDQGGLISDTTEPGTWATDNLIANNNSRTVTVPSDIADGNYVLRHEIIALHSAGETNGAQNYPQCINLKVTGGGSATPSGTLGTALYKNTDPGILINIYTSLSTYDIPGPTLYTAGAAAATAASTAASSTAAAVTTADAVTTAAAVTSSSASVEVVPTTTPSSSIVSAFPTWSPSSTPPFSNSSNGWRPSFSRGPGGPRFTSAPAPQFSAPSGAQQKQSATATPIVATPVVITMTETSTSWVTEMVTLTDKSVVQTTSAVPVVVAATTTLTEGSEPAQTASPSVVSGSSSSGSSSSSTTTTSKTSTGSDYVSSDWMSYLSSLSAAEVLQMLRQTFRWMVSNDKVHARDITIN

SEQ ID NO: 279 - DNA, 1021 bp, Talaromyces stipitatus
atgccttccactaaagttgctgctctatctgccgtcctggctttggcctccacggttgctggccatggctttgtgcaaaatattgtcattgacggtaaatcgtaagtgacttgcttttgtactatagagctagataaatacttatactaaataattcagctacactggctacctcgtgaaccagtatccttaccagtccaacccaccagctgttattgggtggtcaaccactgcaaccgacttgggatttgtcgatggatctggatacaccaacccggatatcatctgccacaaaaacgccaaacccggtcagctttctgctccggttgccgcaggaggcaaggttgagctcgaatggacaacatggcccgagagccatcacggccctgtcatcagctatctcgccaattgcaatggcgattgtactaccgtggataagacgaagctcgaatttgtcaaaatcgatcagcggggtctgatcgacgacagcaatcctcccggtacatgggccgccgaccagctcatcgccgccaacaacagctggactgtaactattcccgagagcatcgcgcctggaaactacgtccttcgccacgaaatcatcgctcttcactccgccaacaacgcaaccggagctcaaaactaccctcaatgcatcaacttgcaaatcactggcagcgggacggccaacccatctggtacccctggcgagaaactctataccccaactgacccaggtatcttggtcaacatctaccagtcattgtcgtcttatgttattcccggtccgactttgtggagtggtgctgcagcgcacgttgttgccactgcagccggttctgctactggggttgcttctgccaccgctactccgaccactcttgtgactgccgtttcatcgcctaccggtgctccttcagtggtgactcctgaggctccttcagtaacctcgttcgccccagtggtgactgttactgatgtcgttactgtgactaccgtcatcactactactatctcttag

SEQ ID NO: 280 - protein, 320 aa, Talaromyces stipitatus
MPSTKVAALSAVLALASTVAGHGFVQNIVIDGKSYTGYLVNQYPYQSNPPAVIGWSTTATDLGFVDGSGYTNPDIICHKNAKPGQLSAPVAAGGKVELEWTTWPESHHGPVISYLANCNGDCTTVDKTKLEFVKIDQRGLIDDSNPPGTWAADQLIAANNSWTVTIPESIAPGNYVLRHEIIALHSANNATGAQNYPQCINLQITGSGTANPSGTPGEKLYTPTDPGILVNIYQSLSSYVIPGPTLWSGAAAHVVATAAGSATGVASATATPTTLVTAVSSPTGAPSVVTPEAPSVTSFAPVVTVTDVVTVTTVITTTIS

SEQ ID NO: 281 - DNA, 1377 bp, Trichoderma reesei
atggcgccctcagttacactgccgttgaccacggccatcctggccattgcccggctcgtcgccgcccagcaaccgggtaccagcacccccgaggtccatcccaagttgacaacctacaagtgtacaaagtccggggggtgcgtggcccaggacacctcggtggtccttgactggaactaccgctggatgcacgacgcaaactacaactcgtgcaccgtcaacggcggcgtcaacaccacgctctgccctgacgaggcgacctgtggcaagaactgcttcatcgagggcgtcgactacgccgcctcgggcgtcacgacctcgggcagcagcctcaccatgaaccagtacatgcccagcagctctggcggctacagcagcgtctctcctcggctgtatctcctggactctgacggtgagtacgtgatgctgaagctcaacggccaggagctgagcttcgacgtcgacctctctgctctgccgtgtggagagaacggctcgctctacctgtctcagatggacgagaacgggggcgccaaccagtataacacggccggtgccaactacgggagcggctactgcgatgctcagtgccccgtccagacatggaggaacggcaccctcaacactagccaccagggcttctgctgcaacgagatggatatcctggagggcaactcgagggcgaatgccttgacccctcactcttgcacggccacggcctgcgactctgccggttgcggcttcaacccctatggcagcggctacaaaagctactacggccccggagataccgttgacacctccaagaccttcaccatcatcacccagttcaacacggacaacggctcgccctcgggcaaccttgtgagcatcacccgcaagtaccagcaaaacggcgtcgacatccccagcgcccagcccggcggcgacaccatctcgtcctgcccgtccgcctcagcctacggcggcctcgccaccatgggcaaggccctgagcagcggcatggtgctcgtgttcagcatttggaacgacaacagccagtacatgaactggctcgacagcggcaacgccggcccctgcagcagcaccgagggcaacccatccaacatcctggccaacaaccccaacacgcacgtcgtcttctccaacatccgctggggagacattgggtctactacgaactcgactgcgcccccgcccccgcctgcgtccagcacgacgttttcgactacacggaggagctcgacgacttcgagcagcccgagctgcacgcagactcactgggggcagtgcggtggcattgggtacagcgggtgcaagacgtgcacgtcgggcactacgtgccagtatagcaacgactactactcgcaatgcctt

SEQ ID NO: 282 - protein, 459 aa, Trichoderma reesei
MAPSVTLPLTTAILAIARLVAAQQPGTSTPEVHPKLTTYKCTKSGGCVAQDTSVVLDWNYRWMHDANYNSCTVNGGVNTTLCPDEATCGKNCFIEGVDYAASGVTTSGSSLTMNQYMPSSSGGYSSVSPRLYLLDSDGEYVMLKLNGQELSFDVDLSALPCGENGSLYLSQMDENGGANQYNTAGANYGSGYCDAQCPVQTWRNGTLNTSHQGFCCNEMDILEGNSRANALTPHSCTATACDSAGCGFNPYGSGYKSYYGPGDTVDTSKTFTIITQFNTDNGSPSGNLVSITRKYQQNGVDIPSAQPGGDTISSCPSASAYGGLATMGKALSSGMVLVFSIWNDNSQYMNWLDSGNAGPCSSTEGNPSNILANNPNTHVVFSNIRWGDIGSTTNSTAPPPPPASSTTFSTTRRSSTTSSSPSCTQTHWGQCGGIGYSGCKTCTSGTTCQYSNDYYSQCL

SEQ ID NO: 283 - DNA, 1254 bp, Trichoderma reesei
atgaacaagtccgtggctccattgctgcttgcagcgtccatactatatggcggcgccgtcgcacagcagactgtctggggccagtgtggaggtattggttggagcggacctacgaattgtgctcctggctcagcttgttcgaccctcaatccttattatgcgcaatgtattccgggagccactactatcaccacttcgacccggccaccatccggtccaaccaccaccaccagggctacctcaacaagctcatcaactccacccacgagctctggggtccgatttgccggcgttaacatcgcgggttttgactttggctgtaccacagatggcacttgcgttacctcgaaggtttatcctccgttgaagaacttcaccggctcaaacaactaccccgatggcatcggccagatgcagcacttcgtcaacgaggacgggatgactattttccgcttacctgtcggatggcagtacctcgtcaacaacaatttgggcggcaatcttgattccacgagcatttccaagtatgatcagcttgttcaggggtgcctgtctctgggcgcatactgcatcgtcgacatccacaattatgctcgatggaacggtgggatcattggtcagggcggccctactaatgctcaattcacgagcctttggtcgcagttggcatcaaagtacgcatctcagtcgagggtgtggttcggcatcatgaatgagccccacgacgtgaacatcaacacctgggctgccacggtccaagaggttgtaaccgcaatccgcaacgctggtgctacgtcgcaattcatctctttgcctggaaatgattggcaatctgctggggctttcatatccgatggcagtgcagccgccctgtctcaagtcacgaacccggatgggtcaacaacgaatctgatttttgacgtgcacaaatacttggactcagacaactccggtactcacgccgaatgtactacaaataacattgacggcgccttttctccgcttgccacttggctccgacagaacaatcgccaggctatcctgacagaaaccggtggtggcaacgttcagtcctgcatacaagacatgtgccagcaaatccaatatctcaaccagaactcagatgtctatcttggctatgttggttggggtgccggatcatttgatagcacgtatgtcctgacggaaacaccgactagcagtggtaactcatggacggacacatccttggtcagctcgtgtctcgcaagaaag

SEQ ID NO: 284 - protein, 418 aa, Trichoderma reesei
MNKSVAPLLLAASILYGGAVAQQTVWGQCGGIGWSGPTNCAPGSACSTLNPYYAQCIPGATTITTSTRPPSGPTTTTRATSTSSSTPPTSSGVRFAGVNIAGFDFGCTTDGTCVTSKVYPPLKNFTGSNNYPDGIGQMQHFVNEDGMTIFRLPVGWQYLVNNNLGGNLDSTSISKYDQLVQGCLSLGAYCIVDIHNYARWNGGIIGQGGPTNAQFTSLWSQLASKYASQSRVWFGIMNEPHDVNINTWAATVQEVVTAIRNAGATSQFISLPGNDWQSAGAFISDGSAAALSQVTNPDGSTTNLIFDVHKYLDSDNSGTHAECTTNNIDGAFSPLATWLRQNNRQAILTETGGGNVQSCIQDMCQQIQYLNQNSDVYLGYVGWGAGSFDSTYVLTETPTSSGNSWTDTSLVSSCLARK

SEQ ID NO: 285 - DNA, 702 bp, Trichoderma reesei
atgaagttccttcaagtcctccctgccctcataccggccgccctggcccaaaccagctgtgaccagtgggcaaccttcactggcaacggctacacagtcagcaacaacctttggggagcatcagccggctctggatttggctgcgtgacggcggtatcgctcagcggcggggcctcctggcacgcagactggcagtggtccggcggccagaacaacgtcaagtcgtaccagaactctcagattgccattccccagaagaggaccgtcaacagcatcagcagcatgcccaccactgccagctggagctacagcgggagcaacatccgcgctaatgttgcgtatgacttgttcaccgcagccaacccgaatcatgtcacgtactcgggagactacgaactcatgatctggcttggcaaatacggcgatattgggccgattgggtcctcacagggaacagtcaacgtcggtggccagagctggacgctctactatggctacaacggagccatgcaagtctattcctttgtggcccagaccaacactaccaactacagcggagatgtcaagaacttcttcaattatctccgagacaataaaggatacaacgctgcaggccaatatgttcttagctaccaatttggtaccgagcccttcacgggcagtggaactctgaacgtcgcatcctggaccgcatctatcaac

SEQ ID NO: 286 - protein, 234 aa, Trichoderma reesei
MKFLQVLPALIPAALAQTSCDQWATFTGNGYTVSNNLWGASAGSGFGCVTAVSLSGGASWHADWQWSGGQNNVKSYQNSQIAIPQKRTVNSISSMPTTASWSYSGSNIRANVAYDLFTAANPNHVTYSGDYELMIWLGKYGDIGPIGSSQGTVNVGGQSWTLYYGYNGAMQVYSFVAQTNTTNYSGDVKNFFNYLRDNKGYNAAGQYVLSYQFGTEPFTGSGTLNVASWTASIN

SEQ ID NO: 287 - DNA, 726 bp, Trichoderma reesei
atgaaggcaactctggttctcggctccctcattgtaggcgccgtttccgcgtacaaggccaccaccacgcgctactacgatgggcaggagggtgcttgcggatgcggctcgagctccggcgcattcccgtggcagctcggcatcggcaacggagtctacacggctgccggctcccaggctctcttcgacacggccggagcttcatggtgcggcgccggctgcggtaaatgctaccagctcacctcgacgggccaggcgccctgctccagctgcggcacgggcggtgctgctggccagagcatcatcgtcatggtgaccaacctgtgcccgaacaatgggaacgcgcagtggtgcccggtggtcggcggcaccaaccaatacggctacagctaccatttcgacatcatggcgcagaacgagatctttggagacaatgtcgtcgtcgactttgagcccattgcttgccccgggcaggctgcctctgactgggggacgtgcctctgcgtgggacagcaagagacggatcccacgcccgtcctcggcaacgacacgggctcaactcctcccgggagctcgccgccagcgacatcgtcgagtccgccgtctggcggcggccagcagacgctctatggccagtgtggaggtgccggctggacgggacctacgacgtgccaggccccagggacctgcaaggttcagaaccagtggtactcccagtgtcttcct

SEQ ID NO: 288 - protein, 242 aa, Trichoderma reesei
MKATLVLGSLIVGAVSAYKATTTRYYDGQEGACGCGSSSGAFPWQLGIGNGVYTAAGSQALFDTAGASWCGAGCGKCYQLTSTGQAPCSSCGTGGAAGQSIIVMVTNLCPNNGNAQWCPVVGGTNQYGYSYHFDIMAQNEIFGDNVVVDFEPIACPGQAASDWGTCLCVGQQETDPTPVLGNDTGSTPPGSSPPATSSSPPSGGGQQTLYGQCGGAGWTGPTTCQAPGTCKVQNQWYSQCLP

SEQ ID NO: 289 - DNA, 923 bp, Humicola insolens
atgcgttcctcccccctcctccgctccgccgttgtggccgccctgccggtgttggcccttgccgctgatggcaggtccacccgctactgggactgctgcaagccttcgtgcggctgggccaagaaggctcccgtgaaccagcctgtcttttcctgcaacgccaacttccagcgtatcacggacttcgacgccaagtccggctgcgagccgggcggtgtcgcctactcgtgcgccgaccagaccccatgggctgtgaacgacgacttcgcgctcggttttgctgccacctctattgccggcagcaatgaggcgggctggtgctgcgcctgctacgagctcaccttcacatccggtcctgttgctggcaagaagatggtcgtccagtccaccagcactggcggtgatcttggcagcaaccacttcgatctcaacatccccggcggcggcgtcggcatcttcgacggatgcactccccagttcggcggtctgcccggccagcgctacggcggcatctcgtcccgcaacgagtgcgatcggttccccgacgccctcaagcccggctgctactggcgcttcgactggttcaagaacgccgacaatccgagcttcagcttccgtcaggtccagtgcccagccgagctcgtcgctcgcaccggatgccgccgcaacgacgacggcaacttccctgccgtccagatcccctccagcagcaccagctctccggtcaaccagcctaccagcaccagcaccacgtccacctccaccacctcgagcccgccagtccagcctacgactcccagcggctgcactgctgagaggtgggctcagtgcggcggcaatggctggagcggctgcaccacctgcgtcgctggcagcacttgcacgaagattaatgactggtaccatcagtgcctgtagaattc

SEQ ID NO: 290 - protein, 305 aa, Humicola insolens
MRSSPLLRSAVVAALPVLALAADGRSTRYWDCCKPSCGWAKKAPVNQPVFSCNANFQRITDFDAKSGCEPGGVAYSCADQTPWAVNDDFALGFAATSIAGSNEAGWCCACYELTFTSGPVAGKKMVVQSTSTGGDLGSNHFDLNIPGGGVGIFDGCTPQFGGLPGQRYGGISSRNECDRFPDALKPGCYWRFDWFKNADNPSFSFRQVQCPAELVARTGCRRNDDGNFPAVQIPSSSTSSPVNQPTSTSTTSTSTTSSPPVQPTTPSGCTAERWAQCGGNGWSGCTTCVAGSTCTKINDWYHQCL

SEQ ID NO: 291 - DNA, 1188 bp, Myceliopthora thermophila
cgacttgaaacgccccaaatgaagtcctccatcctcgccagcgtcttcgccacgggcgccgtggctcaaagtggtccgtggcagcaatgtggtggcatcggatggcaaggatcgaccgactgtgtgtcgggctaccactgcgtctaccagaacgattggtacagccagtgcgtgcctggcgcggcgtcgacaacgctgcagacatcgaccacgtccaggcccaccgccaccagcaccgcccctccgtcgtccaccacctcgcctagcaagggcaagctgaagtggctcggcagcaacgagtcgggcgccgagttcggggagggcaattaccccggcctctggggcaagcacttcatcttcccgtcgacttcggcgattcagacgctcatcaatgatggatacaacatcttccggatcgacttctcgatggagcgtctggtgcccaaccagttgacgtcgtccttcgaccagggttacctccgcaacctgaccgaggtggtcaacttcgtgacgaacgcgggcaagtacgccgtcctggacccgcacaactacggccggtactacggcaacatcatcacggacacgaacgcgttccggaccttctggaccaacctggccaagcagttcgcctccaactcgctcgtcatcttcgacaccaacaacgagtacaacacgatggaccagaccctggtgctcaacctcaaccaggccgccatcgacggcatccgggccgccggcgcgacctcgcagtacatcttcgtcgagggcaacgcgtggagcggggcctggagctggaacacgaccaacaccaacatggccgccctgacggacccgcagaacaagatcgtgtacgagatgcaccagtacctcgactcggacagctcgggcacccacgccgagtgcgtcagcagcaccatcggcgcccagcgcgtcgtcggagccacccagtggctccgcgccaacggcaagctcggcgtcctcggcgagttcgccggcggcgccaacgccgtctgccagcaggccgtcaccggcctcctcgaccacctccaggacaacagcgacgtctggctgggtgccctctggtgggccgccggtccctggtggggcgactacatgtactcgttcgagcctccttcgggcaccggctatgtcaactacaactcgatcttgaagaagtacttgccgtaa

SEQ ID NO: 292 - protein, 389 aa, Myceliopthora thermophila
MKSSILASVFATGAVAQSGPWQQCGGIGWQGSTDCVSGYHCVYQNDWYSQCVPGAASTTLQTSTTSRPTATSTAPPSSTTSPSKGKLKWLGSNESGAEFGEGNYPGLWGKHFIFPSTSAIQTLINDGYNIFRIDFSMERLVPNQLTSSFDQGYLRNLTEVVNFVTNAGKYAVLDPHNYGRYYGNIITDTNAFRTFWTNLAKQFASNSLVIFDTNNEYNTMDQTLVLNLNQAAIDGIRAAGATSQYIFVEGNAWSGAWSWNTTNTNMAALTDPQNKIVYEMHQYLDSDSSGTHAECVSSTIGAQRVVGATQWLRANGKLGVLGEFAGGANAVCQQAVTGLLDHLQDNSDVWLGALWWAAGPWWGDYMYSFEPPSGTGYVNYNSILKKYLP

SEQ ID NO: 293 - DNA, 1232 bp, BASIDIOMYCETE CBS 495.95
ggatccacttagtaacggccgccagtgtgctggaaagcatgaagtctctcttcctgtcacttgtagcgaccgtcgcgctcagctcgccagtattctctgtcgcagtctgggggcaatgcggcggcattggcttcagcggaagcaccgtctgtgatgcaggcgccggctgtgtgaagctcaacgactattactctcaatgccaacccggcgctcccactgctacatccgcggcgccaagtagcaacgcaccgtccggcacttcgacggcctcggccccctcctccagcctttgctctggcagccgcacgccgttccagttcttcggtgtcaacgaatccggcgcggagttcggcaacctgaacatccccggtgttctgggcaccgactacacctggccgtcgccatccagcattgacttcttcatgggcaagggaatgaataccttccgtattccgttcctcatggagcgtcttgtcccccctgccactggcatcacaggacctctcgaccagacgtacttgggcggcctgcagacgattgtcaactacatcaccggcaaaggcggctttgctctcattgacccgcacaactttatgatctacaatggccagacgatctccagtaccagcgacttccagaagttctggcagaacctcgcaggagtgtttaaatcgaacagtcacgtcatcttcgatgttatgaacgagcctcacgatattcccgcccagaccgtgttccaactgaaccaagccgctgtcaatggcatccgtgcgagcggtgcgacgtcgcagctcattctggtcgagggcacaagctggactggagcctggacctggacgacctctggcaacagcgatgcattcggtgccattaaggatcccaacaacaacgtcgcgatccagatgcatcagtacctggatagcgatggctctggcacttcgcagacctgcgtgtctcccaccatcggtgccgagcggttgcaggctgcgactcaatggttgaagcagaacaacctcaagggcttcctgggcgagatcggcgccggctctaactccgcttgcatcagcgctgtgcagggtgcgttgtgttcgatgcagcaatctggtgtgtggctcggcgctctctggtgggctgcgggcccgtggtggggcgactactaccagtccatcgagccgccctctggcccggcggtgtccgcgatcctcccgcaggccctgctgccgttcgcgtaa

SEQ ID NO: 294 - protein, 397 aa, BASIDIOMYCETE CBS 495.95
MKSLFLSLVATVALSSPVFSVAVWGQCGGIGFSGSTVCDAGAGCVKLNDYYSQCQPGAPTATSAAPSSNAPSGTSTASAPSSSLCSGSRTPFQFFGVNESGAEFGNLNIPGVLGTDYTWPSPSSIDFFMGKGMNTFRIPFLMERLVPPATGITGPLDQTYLGGLQTIVNYITGKGGFALIDPHNFMIYNGQTISSTSDFQKFWQNLAGVFKSNSHVIFDVMNEPHDIPAQTVFQLNQAAVNGIRASGATSQLILVEGTSWTGAWTWTTSGNSDAFGAIKDPNNNVAIQMHQYLDSDGSGTSQTCVSPTIGAERLQAATQWLKQNNLKGFLGEIGAGSNSACISAVQGALCSMQQSGVWLGALWWAAGPWWGDYYQSIEPPSGPAVSAILPQALLPFA

SEQ ID NO: 295 - DNA, 1303 bp, BASIDIOMYCETE CBS 495.95
ggaaagcgtcagtatggtgaaatttgcgcttgtggcaactgtcggcgcaatcttgagcgcttctgcggccaatgcggcttctatctaccagcaatgtggaggcattggatggtctgggtccactgtttgcgacgccggtctcgcttgcgttatcctcaatgcgtactactttcagtgcttgacgcccgccgcgggccagacaacgacgggctcgggcgcaccggcgtcaacatcaacctctcactcaacggtcactacggggagctcacactcaacaaccgggacgacggcgacgaaaacaactaccactccgtcgaccaccacgaccctacccgccatctctgtgtctggtcgcgtctgctctggctccaggacgaagttcaagttcttcggtgtgaatgaaagcggcgccgaattcgggaacactgcttggccagggcagctcgggaaagactatacatggccttcgcctagcagcgtggactacttcatgggggctggattcaatacattccgtatcaccttcttgatggagcgtatgagccctccggctaccggactcactggcccattcaaccagacgtacctgtcgggcctcaccaccattgtcgactacatcacgaacaaaggaggatacgctcttattgacccccacaacttcatgcgttacaacaacggcataatcagcagcacatctgacttcgcgacttggtggagcaatttggccactgtattcaaatccacgaagaacgccatcttcgacatccagaacgagccgtacggaatcgatgcgcagaccgtatacgaactgaatcaagctgccatcaattcgatccgcgccgctggcgctacgtcacagttgattctggttgaaggaacgtcatacactggagcttggacgtgggtctcgtccggaaacggagctgctttcgcggccgttacggatccttacaacaacacggcaattgaaatgcaccaatacctcgacagcgacggttctgggacaaacgaagactgtgtctcctccaccattgggtcgcaacgtctccaagctgccactgcgtggctgcaacaaacaggactcaagggattcctcggagagacgggtgctgggtcgaattcccagtgcatcgacgccgtgttcgatgaactttgctatatgcaacagcaaggcggctcctggatcggtgcactctggtgggctgcgggtccctggtggggcacgtacatttactcgattgaacctccgagcggtgccgctatcccagaagtccttcctcagggtctcgctccattcctctag

SEQ ID NO: 296 - protein, 429 aa, BASIDIOMYCETE CBS 495.95
MVKFALVATVGAILSASAANAASIYQQCGGIGWSGSTVCDAGLACVILNAYYFQCLTPAAGQTTTGSGAPASTSTSHSTVTTGSSHSTTGTTATKTTTTPSTTTTLPAISVSGRVCSGSRTKFKFFGVNESGAEFGNTAWPGQLGKDYTWPSPSSVDYFMGAGFNTFRITFLMERMSPPATGLTGPFNQTYLSGLTTIVDYITNKGGYALIDPHNFMRYNNGIISSTSDFATWWSNLATVFKSTKNAIFDIQNEPYGIDAQTVYELNQAAINSIRAAGATSQLILVEGTSYTGAWTWVSSGNGAAFAAVTDPYNNTAIEMHQYLDSDGSGTNEDCVSSTIGSQRLQAATAWLQQTGLKGFLGETGAGSNSQCIDAVFDELCYMQQQGGSWIGALWWAAGPWWGTYIYSIEPPSGAAIPEVLPQGLAPFL

SEQ ID NO: 297 - DNA, 1580 bp, Thielavia terrestris
agccccccgttcaggcacacttggcatcagatcagcttagcagcgcctgcacagcatgaagctctcgcagtcggccgcgctggcggcactcaccgcgacggcgctcgccgccccctcgcccacgacgccgcaggcgccgaggcaggcttcagccggctgctcgtctgcggtcacgctcgacgccagcaccaacgtttggaagaagtacacgctgcaccccaacagctactaccgcaaggaggttgaggccgcggtggcgcagatctcggacccggacctcgccgccaaggccaagaaggtggccgacgtcggcaccttcctgtggctcgactcgatcgagaacatcggcaagctggagccggcgatccaggacgtgccctgcgagaacatcctgggcctggtcatctacgacctgccgggccgcgactgcgcggccaaggcgtccaacggcgagctcaaggtcggcgagatcgaccgctacaagaccgagtacatcgacagtgagtgctgccccccgggttcgagaagagcgtgggggaaagggaaagggttgactgactgacacggcgcactgcagagatcgtgtcgatcctcaaggcacaccccaacacggcgttcgcgctggtcatcgagccggactcgctgcccaacctggtgaccaacagcaacttggacacgtgctcgagcagcgcgtcgggctaccgcgaaggcgtggcttacgccctcaagaacctcaacctgcccaacgtgatcatgtacctcgacgccggccacggcggctggctcggctgggacgccaacctgcagcccggcgcgcaggagctagccaaggcgtacaagaacgccggctcgcccaagcagctccgcggcttctcgaccaacgtggccggctggaactcctggtgagcttttttccattccatttcttcttcctcttctctcttcgctcccactctgcagccccccctcccccaagcacccactggcgttccggcttgctgactcggcctccctttccccgggcaccagggatcaatcgcccggcgaattctcccaggcgtccgacgccaagtacaacaagtgccagaacgagaagatctacgtcagcaccttcggctccgcgctccagtcggccggcatgcccaaccacgccatcgtcgacacgggccgcaacggcgtcaccggcctgcgcaaggagtggggtgactggtgcaacgtcaacggtgcaggttcgttgtcttctttttctcctcttttgtttgcacgtcgtggtccttttcaagcagccgtgtttggttgggggagatggactccggctgatgttctgcttcctctctaggcttcggcgtgcgcccgacgagcaacacgggcctcgagctggccgacgcgttcgtgtgggtcaagcccggcggcgagtcggacggcaccagcgacagctcgtcgccgcgctacgacagcttctgcggcaaggacgacgccttcaagccctcgcccgaggccggcacctggaacgaggcctacttcgagatgctgctcaagaacgccgtgccgtcgttctaagacggtccagcatcatccgg

SEQ ID NO: 298 - protein, 396 aa, Thielavia terrestris
MKLSQSAALAALTATALAAPSPTTPQAPRQASAGCSSAVTLDASTNVWKKYTLHPNSYYRKEVEAAVAQISDPDLAAKAKKVADVGTFLWLDSIENIGKLEPAIQDVPCENILGLVIYDLPGRDCAAKASNGELKVGEIDRYKTEYIDKIVSILKAHPNTAFALVIEPDSLPNLVTNSNLDTCSSSASGYREGVAYALKNLNLPNVIMYLDAGHGGWLGWDANLQPGAQELAKAYKNAGSPKQLRGFSTNVAGWNSWDQSPGEFSQASDAKYNKCQNEKIYVSTFGSALQSAGMPNHAIVDTGRNGVTGLRKEWGDWCNVNGAGFGVRPTSNTGLELADAFVWVKPGGESDGTSDSSSPRYDSFCGKDDAFKPSPEAGTWNEAYFEMLLKNAVPSF

SEQ ID NO: 299 - DNA, 1203 bp, Thielavia terrestris
atgaagtacctcaacctcctcgcagctctcctcgccgtcgctcctctctccctcgctgcacccagcatcgaggccagacagtcgaacgtcaacccatacatcggcaagagcccgctcgttattaggtcgtacgcccaaaagcttgaggagaccgtcaggaccttccagcaacgtggcgaccagctcaacgctgcgaggacacggacggtgcagaacgttgcgactttcgcctggatctcggataccaatggtattggagccattcgacctctcatccaagatgctctcgcccagcaggctcgcactggacagaaggtcatcgtccaaatcgtcgtctacaacctcccagatcgcgactgctctgccaacgcctcgactggagagttcaccgtaggaaacgacggtctcaaccgatacaagaactttgtcaacaccatcgcccgcgagctctcgactgctgacgctgacaagctccactttgccctcctcctcgaacccgacgcacttgccaacctcgtcaccaacgcgaatgcccccaggtgccgaatcgccgctcccgcttacaaggagggtatcgcctacaccctcgccaccttgtccaagcccaacgtcgacgtctacatcgacgccgccaacggtggctggctcggctggaacgacaacctccgccccttcgccgaactcttcaaggaagtctacgacctcgcccgccgcatcaaccccaacgccaaggtccgcggcgtccccgtcaacgtctccaactacaaccagtaccgcgctgaagtccgcgagcccttcaccgagtggaaggacgcctgggacgagagccgctacgtcaacgtcctcaccccgcacctcaacgccgtcggcttctccgcgcacttcatcgttgaccagggacgcggtggcaagggcggtatcaggacggagtggggccagtggtgcaacgttaggaacgctgggttcggtatcaggcctactgcggatcagggcgtgctccagaacccgaatgtggatgcgattgtgtgggttaagccgggtggagagtcggatggcacgagtgatttgaactcgaacaggtatgatcctacgtgcaggagtccggtggcgcatgttcccgctcctgaggctggccagtggttcaacgagtatgttgttaacctcgttttgaacgctaacccccctcttgagcctacctggtaa

SEQ ID NO: 300 - protein, 400 aa, Thielavia terrestris
MKYLNLLAALLAVAPLSLAAPSIEARQSNVNPYIGKSPLVIRSYAQKLEETVRTFQQRGDQLNAARTRTVQNVATFAWISDTNGIGAIRPLIQDALAQQARTGQKVIVQIVVYNLPDRDCSANASTGEFTVGNDGLNRYKNFVNTIARELSTADADKLHFALLLEPDALANLVTNANAPRCRIAAPAYKEGIAYTLATLSKPNVDVYIDAANGGWLGWNDNLRPFAELFKEVYDLARRINPNAKVRGVPVNVSNYNQYRAEVREPFTEWKDAWDESRYVNVLTPHLNAVGFSAHFIVDQGRGGKGGIRTEWGQWCNVRNAGFGIRPTADQGVLQNPNVDAIVWVKPGGESDGTSDLNSNRYDPTCRSPVAHVPAPEAGQWFNEYVVNLVLNANPPLEPTW

SEQ ID NO: 301 - DNA, 1501 bp, Thielavia terrestris
gccgttgtcaagatgggccagaagacgctgcacggattcgccgccacggctttggccgttctcccctttgtgaaggctcagcagcccggcaacttcacgccggaggtgcacccgcaactgccaacgtggaagtgcacgaccgccggcggctgcgttcagcaggacacttcggtggtgctcgactggaactaccgttggatccacaatgccgacggcaccgcctcgtgcacgacgtccagcggggtcgaccacacgctgtgtccagatgaggcgacctgcgcgaagaactgcttcgtggaaggcgtcaactacacgagcagcggtgtcaccacatccggcagttcgctgacgatgaggcagtatttcaaggggagcaacgggcagaccaacagcgtttcgcctcgtctctacctgctcggctcggatggaaactacgtaatgctcaagctgctcggccaggagctgagcttcgatgtcgatctctccacgctcccctgcggcgagaacggcgcgctgtacctgtccgagatggacgcgaccggtggcaggaaccagtacaacaccggcggtgccaactacggctcgggctactgtgacgcccagtgtcccgtgcagacgtggatgaacggcacgctgaacaccaacgggcagggctactgctgcaacgagatggacatcctcgaggccaactcccgcgccaacgcgatgacacctcacccctgcgccaacggcagctgcgacaagagcgggtgcggactcaacccctacgccgagggctacaagagctactacggaccgggcctcacggttgacacgtcgaagcccttcaccatcattacccgcttcatcaccgacgacggcacgaccagcggcaccctcaaccagatccagcggatctatgtgcagaatggcaagacggtcgcgtcggctgcgtccggaggcgacatcatcacggcatccggctgcacctcggcccaggcgttcggcgggctggccaacatgggcgcggcgcttggacggggcatggtgctgaccttcagcatctggaacgacgctgggggctacatgaactggctcgacagcggcaacaacggcccgtgcagcagcaccgagggcaacccgtccaacatcctggccaactacccggacacccacgtggtcttctccaacatccgctggggagacatcggctcgacggtccaggtctcgggaggcggcaacggcggctcgaccaccaccacgtcgaccaccacgctgaggacctcgaccacgaccaccaccaccgccccgacggccactgccacgcactggggacaatgcggcggaatcggggtacgtcaaccgcctcctgcattctgttgaggaagttaactaacgtggcctacgcagtggactggaccgaccgtctgcgaatcgccgtacgcatgcaaggagctgaacccctggtactaccagtgcctctaaagtattgcagtgaagccatactccgtgctcggcatgg

SEQ ID NO: 302 - protein, 464 aa, Thielavia terrestris
MGQKTLHGFAATALAVLPFVKAQQPGNFTPEVHPQLPTWKCTTAGGCVQQDTSVVLDWNYRWIHNADGTASCTTSSGVDHTLCPDEATCAKNCFVEGVNYTSSGVTTSGSSLTMRQYFKGSNGQTNSVSPRLYLLGSDGNYVMLKLLGQELSFDVDLSTLPCGENGALYLSEMDATGGRNQYNTGGANYGSGYCDAQCPVQTWMNGTLNTNGQGYCCNEMDILEANSRANAMTPHPCANGSCDKSGCGLNPYAEGYKSYYGPGLTVDTSKPFTIITRFITDDGTTSGTLNQIQRIYVQNGKTVASAASGGDIITASGCTSAQAFGGLANMGAALGRGMVLTFSIWNDAGGYMNWLDSGNNGPCSSTEGNPSNILANYPDTHVVFSNIRWGDIGSTVQVSGGGNGGSTTTTSTTTLRTSTTTTTTAPTATATHWGQCGGIGWTGPTVCESPYACKELNPWYYQCL

SEQ ID NO: 303 - DNA, 1368 bp, Thielavia terrestris
accgatccgctcgaagatggcgcccaagtctacagttctggccgcctggctgctctcctcgctggccgcggcccagcagatcggcaaagccgtgcccgaggtccaccccaaactgacaacgcagaagtgcactctccgcggcgggtgcaagcctgtccgcacctcggtcgtgctcgactcgtccgcgcgctcgctgcacaaggtcggggaccccaacaccagctgcagcgtcggcggcgacctgtgctcggacgcgaagtcgtgcggcaagaactgcgcgctcgagggcgtcgactacgcggcccacggcgtggcgaccaagggcgacgccctcacgctgcaccagtggctcaagggggccgacggcacctacaggaccgtctcgccgcgcgtatacctcctgggcgaggacgggaagaactacgaggacttcaagctgctcaacgccgagctcagcttcgacgtcgacgtgtcccagctcgtctgcggcatgaacggcgccctgtacttctccgagatggagatggacggcggccgcagcccgctgaacccggcgggcgccacgtacggcacgggctactgcgacgcgcagtgccccaagttggactttatcaacggcgaggtatttcttctctcttctgtttttcttttccatcgctttttctgaccggaatccgccctcttagctcaacaccaaccacacgtacggggcgtgctgcaacgagatggacatctgggaggccaacgcgctggcgcaggcgctcacgccgcacccgtgcaacgcgacgcgggtgtacaagtgcgacacggcggacgagtgcgggcagccggtgggcgtgtgcgacgaatgggggtgctcgtacaacccgtccaacttcggggtcaaggactactacgggcgcaacctgacggtggacacgaaccgcaagttcacggtgacgacgcagttcgtgacgtccaacgggcgggcggacggcgagctgaccgagatccggcggctgtacgtgcaggacggcgtggtgatccagaaccacgcggtcacggcgggcggggcgacgtacgacagcatcacggacggcttctgcaacgcgacggccacctggacgcagcagcggggcgggctcgcgcgcatgggcgaggccatcggccgcggcatggtgctcatcttcagcctgtgggttgacaacggcggcttcatgaactggctcgacagcggcaacgccgggccctgcaacgccaccgagggcgacccggccctgatcctgcagcagcacccggacgccagcgtcaccttctccaacatccgatggggcgagatcggcagcacgtacaagagcgagtgcagccactagagtagagcttgtaatt

SEQ ID NO: 304 - protein, 423 aa, Thielavia terrestris
MAPKSTVLAAWLLSSLAAAQQIGKAVPEVHPKLTTQKCTLRGGCKPVRTSVVLDSSARSLHKVGDPNTSCSVGGDLCSDAKSCGKNCALEGVDYAAHGVATKGDALTLHQWLKGADGTYRTVSPRVYLLGEDGKNYEDFKLLNAELSFDVDVSQLVCGMNGALYFSEMEMDGGRSPLNPAGATYGTGYCDAQCPKLDFINGELNTNHTYGACCNEMDIWEANALAQALTPHPCNATRVYKCDTADECGQPVGVCDEWGCSYNPSNFGVKDYYGRNLTVDTNRKFTVTTQFVTSNGRADGELTEIRRLYVQDGVVIQNHAVTAGGATYDSITDGFCNATATWTQQRGGLARMGEAIGRGMVLIFSLWVDNGGFMNWLDSGNAGPCNATEGDPALILQQHPDASVTFSNIRWGEIGSTYKSECSH

SEQ ID NO: 305 - DNA, 1011 bp, Thielavia terrestris
atgaccctacggctccctgtcatcagcctgctggcctcgctggcagcaggcgccgtcgtcgtcccacgggcggagtttcacccccctctcccgacttggaaatgcacgacctccgggggctgcgtgcagcagaacaccagcgtcgtcctggaccgtgactcgaagtacgccgcacacagcgccggctcgcggacggaatcggattacgcggcaatgggagtgtccacttcgggcaatgccgtgacgctgtaccactacgtcaagaccaacggcaccctcgtccccgcttcgccgcgcatctacctcctgggcgcggacggcaagtacgtgcttatggacctcctcaaccaggagctgtcggtggacgtcgacttctcggcgctgccgtgcggcgagaacggggccttctacctgtccgagatggcggcggacgggcggggcgacgcgggggcgggcgacgggtactgcgacgcgcagtgccagggctactgctgcaacgagatggacatcctcgaggccaactcgatggcgacggccatgacgccgcacccgtgcaagggcaacaactgcgaccgcagcggctgcggctacaacccgtacgccagcggccagcgcggcttctacgggcccggcaagacggtcgacacgagcaagcccttcaccgtcgtcacgcagttcgccgccagcggcggcaagctgacccagatcacccgcaagtacatccagaacggccgggagatcggcggcggcggcaccatctccagctgcggctccgagtcttcgacgggcggcctgaccggcatgggcgaggcgctggggcgcggaatggtgctggccatgagcatctggaacgacgcggcccaggagatggcatggctcgatgccggcaacaacggcccttgcgccagtggccagggcagcccgtccgtcattcagtcgcagcatcccgacacccacgtcgtcttctccaacatcaggtggggcgacatcgggtctaccacgaagaactag

SEQ ID NO: 306 - protein, 336 aa, Thielavia terrestris
MTLRLPVISLLASLAAGAVVVPRAEFHPPLPTWKCTTSGGCVQQNTSVVLDRDSKYAAHSAGSRTESDYAAMGVSTSGNAVTLYHYVKTNGTLVPASPRIYLLGADGKYVLMDLLNQELSVDVDFSALPCGENGAFYLSEMAADGRGDAGAGDGYCDAQCQGYCCNEMDILEANSMATAMTPHPCKGNNCDRSGCGYNPYASGQRGFYGPGKTVDTSKPFTVVTQFAASGGKLTQITRKYIQNGREIGGGGTISSCGSESSTGGLTGMGEALGRGMVLAMSIWNDAAQEMAWLDAGNNGPCASGQGSPSVIQSQHPDTHVVFSNIRWGDIGSTTKN

SEQ ID NO: 307 - DNA, 1480 bp, Cladorrhinum foecundissimum
gatccgaattcctcctctcgttctttagtcacagaccagacatctgcccacgatggttcacaagttcgccctcctcaccggcctcgccgcctccctcgcatctgcccagcagatcggcaccgtcgtccccgagtctcaccccaagcttcccaccaagcgctgcactctcgccggtggctgccagaccgtcgacacctccatcgtcatcgacgccttccagcgtcccctccacaagatcggcgacccttccactccttgcgtcgtcggcggccctctctgccccgacgccaagtcctgcgctgagaactgcgcgctcgagggtgtcgactatgcctcctggggcatcaagaccgagggcgacgccctaactctcaaccagtggatgcccgacccggcgaaccctggccagtacaagacgactactccccgtacttaccttgttgctgaggacggcaagaactacgaggatgtgaagctcctggctaaggagatctcgtttgatgccgatgtcagcaaccttccctgcggcatgaacggtgctttctacttgtctgagatgttgatggatggtggacgtggcgacctcaaccctgctggtgccgagtatggtaccggttactgtgatgcgcagtgcttcaagttggatttcatcaacggcgaggccaacatcgaccaaaagcacggcgcctgctgcaacgaaatggacattttcgaatccaactcgcgcgccaagaccttcgtcccccacccctgcaacatcacgcaggtctacaagtgcgaaggcgaagacgagtgcggccagcccgtcggcgtgtgcgacaagtgggggtgcggcttcaacgagtacaaatggggcgtcgagtccttctacggccggggctcgcagttcgccatcgactcctccaagaagttcaccgtcaccacgcagttcctgaccgacaacggcaaggaggacggcgtcctcgtcgagatccgccgcttgtggcaccaggatggcaagctgatcaagaacaccgctatccaggttgaggagaactacagcacggactcggtgagcaccgagttctgcgagaagactgcttctttcaccatgcagcgcggtggtctcaaggcgatgggcgaggctatcggtcgtggtatggtgctggttttcagcatctgggcggatgattcgggttttatgaactggttggatgcggagggtaatggcccttgcagcgcgactgagggcgatccgaaggagattgtcaagaataagccggatgctagggttacgttctcaaacattaggattggtgaggttggtagcacgtatgctccgggtgggaagtgcggtgttaagagcagggttgctagggggcttactgcttcttaaggggggtgtgaagagaggaggaggtgttgttgggggttggagatgataattgggcgagatggtgtagagcgggttggttggatatgaatacgttgaattggatgt

SEQ ID NO: 308 - protein, 440 aa, Cladorrhinum foecundissimum
MVHKFALLTGLAASLASAQQIGTVVPESHPKLPTKRCTLAGGCQTVDTSIVIDAFQRPLHKIGDPSTPCVVGGPLCPDAKSCAENCALEGVDYASWGIKTEGDALTLNQWMPDPANPGQYKTTTPRTYLVAEDGKNYEDVKLLAKEISFDADVSNLPCGMNGAFYLSEMLMDGGRGDLNPAGAEYGTGYCDAQCFKLDFINGEANIDQKHGACCNEMDIFESNSRAKTFVPHPCNITQVYKCEGEDECGQPVGVCDKWGCGFNEYKWGVESFYGRGSQFAIDSSKKFTVTTQFLTDNGKEDGVLVEIRRLWHQDGKLIKNTAIQVEENYSTDSVSTEFCEKTASFTMQRGGLKAMGEAIGRGMVLVFSIWADDSGFMNWLDAEGNGPCSATEGDPKEIVKNKPDARVTFSNIRIGEVGSTYAPGGKCGVKSRVARGLTAS

SEQ ID NO: 309 - DNA, 1380 bp, Trichoderma reesei
atggcgccctcagttacactgccgttgaccacggccatcctggccattgcccggctcgtcgccgcccagcaaccgggtaccagcacccccgaggtccatcccaagttgacaacctacaagtgtacaaagtccggggggtgcgtggcccaggacacctcggtggtccttgactggaactaccgctggatgcacgacgcaaactacaactcgtgcaccgtcaacggcggcgtcaacaccacgctctgccctgacgaggcgacctgtggcaagaactgcttcatcgagggcgtcgactacgccgcctcgggcgtcacgacctcgggcagcagcctcaccatgaaccagtacatgcccagcagctctggcggctacagcagcgtctctcctcggctgtatctcctggactctgacggtgagtacgtgatgctgaagctcaacggccaggagctgagcttcgacgtcgacctctctgctctgccgtgtggagagaacggctcgctctacctgtctcagatggacgagaacgggggcgccaaccagtataacacggccggtgccaactacgggagcggctactgcgatgctcagtgccccgtccagacatggaggaacggcaccctcaacactagccaccagggcttctgctgcaacgagatggatatcctggagggcaactcgagggcgaatgccttgacccctcactcttgcacggccacggcctgcgactctgccggttgcggcttcaacccctatggcagcggctacaaaagctactacggccccggagataccgttgacacctccaagaccttcaccatcatcacccagttcaacacggacaacggctcgccctcgggcaaccttgtgagcatcacccgcaagtaccagcaaaacggcgtcgacatccccagcgcccagcccggcggcgacaccatctcgtcctgcccgtccgcctcagcctacggcggcctcgccaccatgggcaaggccctgagcagcggcatggtgctcgtgttcagcatttggaacgacaacagccagtacatgaactggctcgacagcggcaacgccggcccctgcagcagcaccgagggcaacccatccaacatcctggccaacaaccccaacacgcacgtcgtcttctccaacatccgctggggagacattgggtctactacgaactcgactgcgcccccgcccccgcctgcgtccagcacgacgttttcgactacacggaggagctcgacgacttcgagcagcccgagctgcacgcagactcactgggggcagtgcggtggcattgggtacagcgggtgcaagacgtgcacgtcgggcactacgtgccagtatagcaacgactactactcgcaatgcctttag

SEQ ID NO: 310 - protein, 459 aa, Trichoderma reesei; identical to SEQ ID NO: 282

SEQ ID NO: 311 - DNA, 1545 bp, Trichoderma reesei
atgtatcggaagttggccgtcatctcggccttcttggccacagctcgtgctcagtcggcctgcactctccaatcggagactcacccgcctctgacatggcagaaatgctcgtctggtggcacgtgcactcaacagacaggctccgtggtcatcgacgccaactggcgctggactcacgctacgaacagcagcacgaactgctacgatggcaacacttggagctcgaccctatgtcctgacaacgagacctgcgcgaagaactgctgtctggacggtgccgcctacgcgtccacgtacggagttaccacgagcggtaacagcctctccattggctttgtcacccagtctgcgcagaagaacgttggcgctcgcctttaccttatggcgagcgacacgacctaccaggaattcaccctgcttggcaacgagttctctttcgatgttgatgtttcgcagctgccgtgcggcttgaacggagctctctacttcgtgtccatggacgcggatggtggcgtgagcaagtatcccaccaacaccgctggcgccaagtacggcacggggtactgtgacagccagtgtccccgcgatctgaagttcatcaatggccaggccaacgttgagggctgggagccgtcatccaacaacgcgaacacgggcattggaggacacggaagctgctgctctgagatggatatctgggaggccaactccatctccgaggctcttaccccccacccttgcacgactgtcggccaggagatctgcgagggtgatgggtgcggcggaacttactccgataacagatatggcggcacttgcgatcccgatggctgcgactggaacccataccgcctgggcaacaccagcttctacggccctggctcaagctttaccctcgataccaccaagaaattgaccgttgtcacccagttcgagacgtcgggtgccatcaaccgatactatgtccagaatggcgtcactttccagcagcccaacgccgagcttggtagttactctggcaacgagctcaacgatgattactgcacagctgaggaggcagaattcggcggatcctctttctcagacaagggcggcctgactcagttcaagaaggctacctctggcggcatggttctggtcatgagtctgtgggatgattactacgccaacatgctgtggctggactccacctacccgacaaacgagacctcctccacacccggtgccgtgcgcggaagctgctccaccagctccggtgtccctgctcaggtcgaatctcagtctcccaacgccaaggtcaccttctccaacatcaagttcggacccattggcagcaccggcaaccctagcggcggcaaccctcccggcggaaacccgcctggcaccaccaccacccgccgcccagccactaccactggaagctctcccggacctacccagtctcactacggccagtgcggcggtattggctacagcggccccacggtctgcgccagcggcacaacttgccaggtcctgaacccttactactctcagtgcctgtaa

SEQ ID NO: 312 - protein, 514 aa, Trichoderma reesei
MYRKLAVISAFLATARAQSACTLQSETHPPLTWQKCSSGGTCTQQTGSVVIDANWRWTHATNSSTNCYDGNTWSSTLCPDNETCAKNCCLDGAAYASTYGVTTSGNSLSIGFVTQSAQKNVGARLYLMASDTTYQEFTLLGNEFSFDVDVSQLPCGLNGALYFVSMDADGGVSKYPTNTAGAKYGTGYCDSQCPRDLKFINGQANVEGWEPSSNNANTGIGGHGSCCSEMDIWEANSISEALTPHPCTTVGQEICEGDGCGGTYSDNRYGGTCDPDGCDWNPYRLGNTSFYGPGSSFTLDTTKKLTVVTQFETSGAINRYYVQNGVTFQQPNAELGSYSGNELNDDYCTAEEAEFGGSSFSDKGGLTQFKKATSGGMVLVMSLWDDYYANMLWLDSTYPTNETSSTPGAVRGSCSTSSGVPAQVESQSPNAKVTFSNIKFGPIGSTGNPSGGNPPGGNPPGTTTTRRPATTTGSSPGPTQSHYGQCGGIGYSGPTVCASGTTCQVLNPYYSQCL

SEQ ID NO: 313 - DNA, 1611 bp, Trichoderma reesei
atgattgtcggcattctcaccacgctggctacgctggccacactcgcagctagtgtgcctctagaggagcggcaagcttgctcaagcgtctggtaattatgtgaaccctctcaagagacccaaatactgagatatgtcaaggggccaatgtggtggccagaattggtcgggtccgacttgctgtgcttccggaagcacatgcgtctactccaacgactattactcccagtgtcttcccggcgctgcaagctcaagctcgtccacgcgcgccgcgtcgacgacttctcgagtatcccccacaacatcccggtcgagctccgcgacgcctccacctggttctactactaccagagtacctccagtcggatcgggaaccgctacgtattcaggcaacccttttgttggggtcactccttgggccaatgcatattacgcctctgaagttagcagcctcgctattcctagcttgactggagccatggccactgctgcagcagctgtcgcaaaggttccctcttttatgtggctgtaggtcctcccggaaccaaggcaatctgttactgaaggctcatcattcactgcagagatactcttgacaagacccctctcatggagcaaaccttggccgacatccgcaccgccaacaagaatggcggtaactatgccggacagtttgtggtgtatgacttgccggatcgcgattgcgctgcccttgcctcgaatggcgaatactctattgccgatggtggcgtcgccaaatataagaactatatcgacaccattcgtcaaattgtcgtggaatattccgatatccggaccctcctggttattggtatgagtttaaacacctgcctccccccccccttcccttcctttcccgccggcatcttgtcgttgtgctaactattgttccctcttccagagcctgactctcttgccaacctggtgaccaacctcggtactccaaagtgtgccaatgctcagtcagcctaccttgagtgcatcaactacgccgtcacacagctgaaccttccaaatgttgcgatgtatttggacgctggccatgcaggatggcttggctggccggcaaaccaagacccggccgctcagctatttgcaaatgtttacaagaatgcatcgtctccgagagctcttcgcggattggcaaccaatgtcgccaactacaacgggtggaacattaccagccccccatcgtacacgcaaggcaacgctgtctacaacgagaagctgtacatccacgctattggacgtcttcttgccaatcacggctggtccaacgccttcttcatcactgatcaaggtcgatcgggaaagcagcctaccggacagcaacagtggggagactggtgcaatgtgatcggcaccggatttggtattcgcccatccgcaaacactggggactcgttgctggattcgtttgtctgggtcaagccaggcggcgagtgtgacggcaccagcgacagcagtgcgccacgatttgactcccactgtgcgctcccagatgccttgcaaccggcgcctcaagctggtgcttggttccaagcctactttgtgcagcttctcacaaacgcaaacccatcgttcctgtaa

SEQ ID NO: 314 - protein, 471 aa, Trichoderma reesei
MIVGILTTLATLATLAASVPLEERQACSSVWGQCGGQNWSGPTCCASGSTCVYSNDYYSQCLPGAASSSSSTRAASTTSRVSPTTSRSSSATPPPGSTTTRVPPVGSGTATYSGNPFVGVTPWANAYYASEVSSLAIPSLTGAMATAAAAVAKVPSFMWLDTLDKTPLMEQTLADIRTANKNGGNYAGQFVVYDLPDRDCAALASNGEYSIADGGVAKYKNYIDTIRQIVVEYSDIRTLLVIEPDSLANLVTNLGTPKCANAQSAYLECINYAVTQLNLPNVAMYLDAGHAGWLGWPANQDPAAQLFANVYKNASSPRALRGLATNVANYNGWNITSPPSYTQGNAVYNEKLYIHAIGRLLANHGWSNAFFITDQGRSGKQPTGQQQWGDWCNVIGTGFGIRPSANTGDSLLDSFVWVKPGGECDGTSDSSAPRFDSHCALPDALQPAPQAGAWFQAYFVQLLTNANPSFL

SEQ ID NO: 315 - DNA, 2046 bp, Humicola insolens
gccgtgaccttgcgcgctttgggtggcggtggcgagtcgtggacggtgcttgctggtcgccggccttcccggcgatccgcgtgatgagagggccaccaacggcgggatgatgctccatggggaacttccccatggagaagagagagaaacttgcggagccgtgatctggggaaagatgctccgtgtctcgtctatataactcgagtctccccgagccctcaacaccaccagctctgatctcaccatccccatcgacaatcacgcaaacacagcagttgtcgggccattccttcagacacatcagtcaccctccttcaaaatgcgtaccgccaagttcgccaccctcgccgcccttgtggcctcggccgccgcccagcaggcgtgcagtctcaccaccgagaggcacccttccctctcttggaacaagtgcaccgccggcggccagtgccagaccgtccaggcttccatcactctcgactccaactggcgctggactcaccaggtgtctggctccaccaactgctacacgggcaacaagtgggatactagcatctgcactgatgccaagtcgtgcgctcagaactgctgcgtcgatggtgccgactacaccagcacctatggcatcaccaccaacggtgattccctgagcctcaagttcgtcaccaagggccagcactcgaccaacgtcggctcgcgtacctacctgatggacggcgaggacaagtatcagagtacgttctatcttcagccttctcgcgccttgaatcctggctaacgtttacacttcacagccttcgagctcctcggcaacgagttcaccttcgatgtcgatgtctccaacatcggctgcggtctcaacggcgccctgtacttcgtctccatggacgccgatggtggtctcagccgctatcctggcaacaaggctggtgccaagtacggtaccggctactgcgatgctcagtgcccccgtgacatcaagttcatcaacggcgaggccaacattgagggctggaccggctccaccaacgaccccaacgccggcgcgggccgctatggtacctgctgctctgagatggatatctgggaagccaacaacatggctactgccttcactcctcacccttgcaccatcattggccagagccgctgcgagggcgactcgtgcggtggcacctacagcaacgagcgctacgccggcgtctgcgaccccgatggctgcgacttcaactcgtaccgccagggcaacaagaccttctacggcaagggcatgaccgtcgacaccaccaagaagatcactgtcgtcacccagttcctcaaggatgccaacggcgatctcggcgagatcaagcgcttctacgtccaggatggcaagatcatccccaactccgagtccaccatccccggcgtcgagggcaattccatcacccaggactggtgcgaccgccagaaggttgcctttggcgacattgacgacttcaaccgcaagggcggcatgaagcagatgggcaaggccctcgccggccccatggtcctggtcatgtccatctgggatgaccacgcctccaacatgctctggctcgactcgaccttccctgtcgatgccgctggcaagcccggcgccgagcgcggtgcctgcccgaccacctcgggtgtccctgctgaggttgaggccgaggcccccaacagcaacgtcgtcttctccaacatccgcttcggccccatcggctcgaccgttgctggtctccccggcgcgggcaacggcggcaacaacggcggcaaccccccgccccccaccaccaccacctcctcggctccggccaccaccaccaccgccagcgctggccccaaggctggccgctggcagcagtgcggcggcatcggcttcactggcccgacccagtgcgaggagccctacatttgcaccaagctcaacgactggtactctcagtgcctgtaaattctgagtcgctgactcgacgatcacggccggtttttgcatgaaaggaaacaaacgaccgcgataaaaatggagggtaatgagatgtc

SEQ ID NO: 316 - protein, 525 aa, Humicola insolens
MRTAKFATLAALVASAAAQQACSLTTERHPSLSWNKCTAGGQCQTVQASITLDSNWRWTHQVSGSTNCYTGNKWDTSICTDAKSCAQNCCVDGADYTSTYGITTNGDSLSLKFVTKGQHSTNVGSRTYLMDGEDKYQTFELLGNEFTFDVDVSNIGCGLNGALYFVSMDADGGLSRYPGNKAGAKYGTGYCDAQCPRDIKFINGEANIEGWTGSTNDPNAGAGRYGTCCSEMDIWEANNMATAFTPHPCTIIGQSRCEGDSCGGTYSNERYAGVCDPDGCDFNSYRQGNKTFYGKGMTVDTTKKITVVTQFLKDANGDLGEIKRFYVQDGKIIPNSESTIPGVEGNSITQDWCDRQKVAFGDIDDFNRKGGMKQMGKALAGPMVLVMSIWDDHASNMLWLDSTFPVDAAGKPGAERGACPTTSGVPAEVEAEAPNSNVVFSNIRFGPIGSTVAGLPGAGNGGNNGGNPPPPTTTTSSAPATTTTASAGPKAGRWQQCGGIGFTGPTQCEEPYICTKLNDWYSQCL

SEQ ID NO: 317 - DNA, 1812 bp, Myceliophthora thermophila
atggccaagaagcttttcatcaccgccgcccttgcggctgccgtgttggcggcccccgtcattgaggagcgccagaactgcggcgctgtgtggtaagaaagcccggtctgagtttcccatgactttctcatcgagtaatggcataaggcccaccccttcgactgactgtgagaatcgatcaaatccaggactcaatgcggcggcaacgggtggcagggtcccacatgctgcgcctcgggctcgacctgcgttgcgcagaacgagtggtactctcagtgcctgcccaacaatcaggtgacgagttccaacactccgtcgtcgacttccacctcgcagcgcagcagcagcacctccagcagcagcaccaggagcggcagctcctcctcctccaccaccacgccccctcccgtctccagccccgtgactagcattcccggcggtgcgaccaccacggcgagctactctggcaaccccttctcgggcgtccggctcttcgccaacgactactacaggtccgaggtccacaatctcgccattcctagcatgaccggtactctggcggccaaggcttccgccgtcgccgaagtccctagcttccagtggctcgaccggaacgtcaccatcgacaccctgatggtccagactctgtcccagatccgggctgccaataatgccggtgccaatcctccctatgctggtgagttacatggcggcgacttgccttctcgtcccccacctttcttgacgggatcggttacctgacctggaggcaaaacaaaaccagcccaacttgtcgtctacgacctccccgaccgtgactgcgccgccgctgcgtccaacggcgagttttcgattgcaaacggcggcgccgccaactacaggagctacatcgacgctatccgcaagcacatcattgagtactcggacatccggatcatcctggttatcgagcccgactcgatggccaacatggtgaccaacatgaacgtggccaagtgcagcaacgccgcgtcgacgtaccacgagttgaccgtgtacgcgctcaagcagctgaacctgcccaacgtcgccatgtatctcgacgccggccacgccggctggctcggctggcccgccaacatccagcccgccgccgacctgtttgccggcatctacaatgacgccggcaagccggctgccgtccgcggcctggccactaacgtcgccaactacaacgcctggagtatcgcttcggccccgtcgtacacgtcccctaaccctaactacgacgagaagcactacatcgaggccttcagcccgctcctgaacgcggccggcttccccgcacgcttcattgtcgacactggccgcaacggcaaacaacctaccggtatggtttttttctttttttttctctgttcccctcccccttccccttcagttggcgtccacaaggtctcttagtcttgcttcttctcggaccaaccttcccccacccccaaaacgcaccgcccacaaccgttcgactctatactcttgggaatgggcgccgaaactgaccgttcgacaggccaacaacagtggggtgactggtgcaatgtcaagggcactggctttggcgtgcgcccgacggccaacacgggccacgacctggtcgatgcctttgtctgggtcaagcccggcggcgagtccgacggcacaagcgacaccagcgccgcccgctacgactaccactgcggcctgtccgatgccctgcagcctgctccggaggctggacagtggttccaggcctacttcgagcagctgctcaccaacgccaacccgcccttctaa

SEQ ID NO: 318 - protein, 482 aa, Myceliophthora thermophila
MAKKLFITAALAAAVLAAPVIEERQNCGAVWTQCGGNGWQGPTCCASGSTCVAQNEWYSQCLPNNQVTSSNTPSSTSTSQRSSSTSSSSTRSGSSSSSTTTPPPVSSPVTSIPGGATTTASYSGNPFSGVRLFANDYYRSEVHNLAIPSMTGTLAAKASAVAEVPSFQWLDRNVTIDTLMVQTLSQIRAANNAGANPPYAAQLVVYDLPDRDCAAAASNGEFSIANGGAANYRSYIDAIRKHIIEYSDIRIILVIEPDSMANMVTNMNVAKCSNAASTYHELTVYALKQLNLPNVAMYLDAGHAGWLGWPANIQPAADLFAGIYNDAGKPAAVRGLATNVANYNAWSIASAPSYTSPNPNYDEKHYIEAFSPLLNAAGFPARFIVDTGRNGKQPTGQQQWGDWCNVKGTGFGVRPTANTGHDLVDAFVWVKPGGESDGTSDTSAARYDYHCGLSDALQPAPEAGQWFQAYFEQLLTNANPPF

SEQ ID NO: 319 - DNA, 1802 bp, Myceliophthora thermophila
atggccaagaagcttttcatcaccgccgcgcttgcggctgccgtgttggcggcccccgtcattgaggagcgccagaactgcggcgctgtgtggtaagaaagcccggtccgagtctcccatgattttctcgtcgagtaatggcataagggccaccccttcgactgaccgtgagaatcgatcaaatccaggactcaatgcggcggtaacgggtggcaaggtcccacatgctgcgcctcgggctcgacctgcgttgcgcagaacgagtggtactctcagtgcctgcccaacagccaggtgacgagttccaccactccgtcgtcgacttccacctcgcagcgcagcaccagcacctccagcagcaccaccaggagcggcagctcctcctcctcctccaccacgcccccgcccgtctccagccccgtgaccagcattcccggcggtgcgacctccacggcgagctactctggcaaccccttctcgggcgtccggctcttcgccaacgactactacaggtccgaggtccacaatctcgccattcctagcatgactggtactctggcggccaaggcttccgccgtcgccgaagtccctagcttccagtggctcgaccggaacgtcaccatcgacaccctgatggtccagactctgtcccaggtccgggctctcaataaggccggtgccaatcctccctatgctggtgagttacatggcgacttgccttctcgtcccctacctttcttgacgggatcggttacctgacctggaggcaaaacaacaacagcccaactcgtcgtctacgacctccccgaccgtgactgtgccgccgctgcgtccaacggcgagttttcgattgcaaacggcggcgccgccaactacaggagctacatcgacgctatccgcaagcacatcattgagtactcggacatccggatcatcctggttatcgagcccgactcgatggccaacatggtgaccaacatgaacgtggccaagtgcagcaacgccgcgtcgacgtaccacgagttgaccgtgtacgcgctcaagcagctgaacctgcccaacgtcgccatgtatctcgacgccggccacgccggctggctcggctggcccgccaacatccagcccgccgccgagctgtttgccggcatctacaatgatgccggcaagccggctgccgtccgcggcctggccactaacgtcgccaactacaacgcctggagcatcgcttcggccccgtcgtacacgtcgcctaaccctaactacgacgagaagcactacatcgaggccttcagcccgctcttgaactcggccggcttccccgcacgcttcattgtcgacactggccgcaacggcaaacaacctaccggtatgtttttttttcttttgtctctgtcccccccttttctcccccttcagttggcgtccacaaggtctcttagtcctgcttcatctgtgaccaacctccccccccccggcaccgcccacaaccgtttgactctatactcttgggaatgggcgccgaaactgaccgttccacaggccaacaacagtggggtgactggtgcaatgtcaagggcaccggctttggcgtgcgcccgacggccaacacgggccacgagctggtcgatgcctttgtctgggtcaagcccggcggcgagtccgacggcacaagcgacaccagcgccgcccgctacgactaccactgcggcctgtccgatgccctgcagcctgcccccgaggctggacagtggttccaggcctacttcgagcagctgctcaccaacgccaacccgcccttctaa

SEQ ID NO: 320 - protein, 481 aa, Myceliophthora thermophila
MAKKLFITAALAAAVLAAPVIEERQNCGAVWTQCGGNGWQGPTCCASGSTCVAQNEWYSQCLPNSQVTSSTTPSSTSTSQRSTSTSSSTTRSGSSSSSSTTPPPVSSPVTSIPGGATSTASYSGNPFSGVRLFANDYYRSEVHNLAIPSMTGTLAAKASAVAEVPSFQWLDRNVTIDTLMVQTLSQVRALNKAGANPPYAAQLVVYDLPDRDCAAAASNGEFSIANGGAANYRSYIDAIRKHIIEYSDIRIILVIEPDSMANMVTNMNVAKCSNAASTYHELTVYALKQLNLPNVAMYLDAGHAGWLGWPANIQPAAELFAGIYNDAGKPAAVRGLATNVANYNAWSIASAPSYTSPNPNYDEKHYIEAFSPLLNSAGFPARFIVDTGRNGKQPTGQQQWGDWCNVKGTGFGVRPTANTGHELVDAFVWVKPGGESDGTSDTSAARYDYHCGLSDALQPAPEAGQWFQAYFEQLLTNANPP

SEQ ID NO: 321 - DNA, 1446 bp, Thielavia terrestris
atggctcagaagctccttctcgccgccgcccttgcggccagcgccctcgctgctcccgtcgtcgaggagcgccagaactgcggttccgtctggagccaatgcggcggcattggctggtccggcgcgacctgctgcgcttcgggcaatacctgcgttgagctgaacccgtactactcgcagtgcctgcccaacagccaggtgactacctcgaccagcaagaccacctccaccaccaccaggagcagcaccaccagccacagcagcggtcccaccagcacgagcaccaccaccaccagcagtcccgtggtcactaccccgccgagtacctccatccccggcggtgcctcgtcaacggccagctggtccggcaacccgttctcgggcgtgcagatgtgggccaacgactactacgcctccgaggtctcgtcgctggccatccccagcatgacgggcgccatggccaccaaggcggccgaggtggccaaggtgcccagcttccagtggcttgaccgcaacgtcaccatcgacacgctgttcgcccacacgctgtcgcagatccgcgcggccaaccagaaaggcgccaacccgccctacgcgggcatcttcgtggtctacgaccttccggaccgcgactgcgccgccgccgcgtccaacggcgagttctccatcgcgaacaacggggcggccaactacaagacgtacatcgacgcgatccggagcctcgtcatccagtactcagacatccgcatcatcttcgtcatcgagcccgactcgctggccaacatggtgaccaacctgaacgtggccaagtgcgccaacgccgagtcgacctacaaggagttgaccgtctacgcgctgcagcagctgaacctgcccaacgtggccatgtacctggacgccggccacgccggctggctcggctggcccgccaacatccagccggccgccaacctcttcgccgagatctacacgagcgccggcaagccggccgccgtgcgcggcctcgccaccaacgtggccaactacaacggctggagcctggccacgccgccctcgtacacccagggcgaccccaactacgacgagagccactacgtccaggccctcgccccgctgctcaccgccaacggcttccccgcccacttcatcaccgacaccggccgcaacggcaagcagccgaccggacaacggcaatggggagactggtgcaacgttatcggaactggcttcggcgtgcgcccgacgacaaacaccggcctcgacatcgaggacgccttcgtctgggtcaagcccggcggcgagtgcgacggcacgagcaacacgacctctccccgctacgactaccactgcggcctgtcggacgcgctgcagcctgctccggaggccggcacttggttccaggcctacttcgagcagctcctgaccaacgccaacccgcccttttaa

SEQ ID NO: 322 - protein, 481 aa, Thielavia terrestris
MAQKLLLAAALAASALAAPVVEERQNCGSVWSQCGGIGWSGATCCASGNTCVELNPYYSQCLPNSQVTTSTSKTTSTTTRSSTTSHSSGPTSTSTTTTSSPVVTTPPSTSIPGGASSTASWSGNPFSGVQMWANDYYASEVSSLAIPSMTGAMATKAAEVAKVPSFQWLDRNVTIDTLFAHTLSQIRAANQKGANPPYAGIFVVYDLPDRDCAAAASNGEFSIANNGAANYKTYIDAIRSLVIQYSDIRIIFVIEPDSLANMVTNLNVAKCANAESTYKELTVYALQQLNLPNVAMYLDAGHAGWLGWPANIQPAANLFAEIYTSAGKPAAVRGLATNVANYNGWSLATPPSYTQGDPNYDESHYVQALAPLLTANGFPAHFITDTGRNGKQPTGQRQWGDWCNVIGTGFGVRPTTNTGLDIEDAFVWVKPGGECDGTSNTTSPRYDYHCGLSDALQPAPEAGTWFQAYFEQLLTNANPPF

SEQ ID NO: 323 - DNA, 1593 bp, Chaetomium thermophilum
atgatgtacaagaagttcgccgctctcgccgccctcgtggctggcgccgccgcccagcaggcttgctccctcaccactgagacccaccccagactcacttggaagcgctgcacctctggcggcaactgctcgaccgtgaacggcgccgtcaccatcgatgccaactggcgctggactcacactgtttccggctcgaccaactgctacaccggcaacgagtgggatacctccatctgctctgatggcaagagctgcgcccagacctgctgcgtcgacggcgctgactactcttcgacctatggtatcaccaccagcggtgactccctgaacctcaagttcgtcaccaagcaccagcacggcaccaatgtcggctctcgtgtctacctgatggagaacgacaccaagtaccagatgttcgagctcctcggcaacgagttcaccttcgatgtcgatgtctctaacctgggctgcggtctcaacggcgccctctacttcgtctccatggacgctgatggtggtatgagcaagtactctggcaacaaggctggcgccaagtacggtaccggctactgcgatgctcagtgcccgcgcgaccttaagttcatcaacggcgaggccaacattgagaactggaccccttcgaccaatgatgccaacgccggtttcggccgctatggcagctgctgctctgagatggatatctgggatgccaacaacatggctactgccttcactcctcacccttgcaccattatcggccagagccgctgcgagggcaacagctgcggtggcacctacagctctgagcgctatgctggtgtttgcgatcctgatggctgcgacttcaacgcctaccgccagggcgacaagaccttctacggcaagggcatgaccgtcgacaccaccaagaagatgaccgtcgtcacccagttccacaagaactcggctggcgtcctcagcgagatcaagcgcttctacgttcaggacggcaagatcattgccaacgccgagtccaagatccccggcaaccccggcaactccatcacccaggagtggtgcgatgcccagaaggtcgccttcggtgacatcgatgacttcaaccgcaagggcggtatggctcagatgagcaaggccctcgagggccctatggtcctggtcatgtccgtctgggatgaccactacgccaacatgctctggctcgactcgacctaccccattgacaaggccggcacccccggcgccgagcgcggtgcttgcccgaccacctccggtgtccctgccgagattgaggcccaggtccccaacagcaacgttatcttctccaacatccgcttcggccccatcggctcgaccgtccctggcctcgacggcagcacccccagcaacccgaccgccaccgttgctcctcccacttctaccaccaccagcgtgagaagcagcactactcagatttccaccccgactagccagcccggcggctgcaccacccagaagtggggccagtgcggtggtatcggctacaccggctgcactaactgcgttgctggcactacctgcactgagctcaacccctggtacagccagtgcctgtaa

SEQ ID NO: 324 - protein, 530 aa, Chaetomium thermophilum
MMYKKFAALAALVAGAAAQQACSLTTETHPRLTWKRCTSGGNCSTVNGAVTIDANWRWTHTVSGSTNCYTGNEWDTSICSDGKSCAQTCCVDGADYSSTYGITTSGDSLNLKFVTKHQHGTNVGSRVYLMENDTKYQMFELLGNEFTFDVDVSNLGCGLNGALYFVSMDADGGMSKYSGNKAGAKYGTGYCDAQCPRDLKFINGEANIENWTPSTNDANAGFGRYGSCCSEMDIWDANNMATAFTPHPCTIIGQSRCEGNSCGGTYSSERYAGVCDPDGCDFNAYRQGDKTFYGKGMTVDTTKKMTVVTQFHKNSAGVLSEIKRFYVQDGKIIANAESKIPGNPGNSITQEWCDAQKVAFGDIDDFNRKGGMAQMSKALEGPMVLVMSVWDDHYANMLWLDSTYPIDKAGTPGAERGACPTTSGVPAEIEAQVPNSNVIFSNIRFGPIGSTVPGLDGSTPSNPTATVAPPTSTTTSVRSSTTQISTPTSQPGGCTTQKWGQCGGIGYTGCTNCVAGTTCTELNPWYSQCL

SEQ ID NO: 325 - DNA, 1434 bp, Chaetomium thermophilum
atggctaagcagctgctgctcactgccgctcttgcggccacttcgctggctgcccctctccttgaggagcgccagagctgctcctccgtctggggtcaatgcggtggcatcaattacaacggcccgacctgctgccagtccggcagtgtttgcacttacctgaatgactggtacagccagtgcattcccggtcaggctcagcccggcacgactagcaccacggctcggaccaccagcaccagcaccaccagcacttcgtcggtccgcccgaccacctcgaatacccctgtgacgactgctcccccgacgaccaccatcccgggcggcgcctcgagcacggccagctacaacggcaacccgttttcgggtgttcaactttgggccaacacctactactcgtccgaggtgcacactttggccatccccagcttgtctcctgagctggctgccaaggccgccaaggtcgctgaggttcccagcttccagtggctcgaccgcaatgtgactgttgacactctcttctccggcactcttgccgaaatccgcgccgccaaccagcgcggtgccaacccgccttatgccggcattttcgtggtttatgacttaccagaccgtgattgcgcggctgctgcttcgaacggcgagtggtctatcgccaacaatggtgccaacaactacaagcgctacatcgaccggatccgtgagctccttatccagtactccgatatccgcactattctggtcattgaacctgattccctggccaacatggtcaccaacatgaacgtccagaagtgctcgaacgctgcctccacttacaaggagcttactgtctatgccctcaaacagctcaatcttcctcacgttgccatgtacatggatgctggccacgctggctggcttggctggcccgccaacatccagcctgctgctgagctctttgctcaaatctaccgcgacgctggcaggcccgctgctgtccgcggtcttgcgaccaacgttgccaactacaatgcttggtcgatcgccagccctccgtcctacacctctcctaacccgaactacgacgagaagcactatattgaggcctttgctcctcttctccgcaaccagggcttcgacgcaaagttcatcgtcgacaccggccgtaacggcaagcagcccactggccagcttgaatggggtcactggtgcaatgtcaagggaactggcttcggtgtgcgccctactgctaacactgggcatgaacttgttgatgctttcgtgtgggtcaagcccggtggcgagtccgacggcaccagtgcggacaccagcgctgctcgttatgactatcactgcggcctttccgacgcactgactccggcgcctgaggctggccaatggttccaggcttatttcgaacagctgctcatcaatgccaaccctccgctctga

SEQ ID NO: 326 - protein, 477 aa, Chaetomium thermophilum
MAKQLLLTAALAATSLAAPLLEERQSCSSVWGQCGGINYNGPTCCQSGSVCTYLNDWYSQCIPGQAQPGTTSTTARTTSTSTTSTSSVRPTTSNTPVTTAPPTTTIPGGASSTASYNGNPFSGVQLWANTYYSSEVHTLAIPSLSPELAAKAAKVAEVPSFQWLDRNVTVDTLFSGTLAEIRAANQRGANPPYAGIFVVYDLPDRDCAAAASNGEWSIANNGANNYKRYIDRIRELLIQYSDIRTILVIEPDSLANMVTNMNVQKCSNAASTYKELTVYALKQLNLPHVAMYMDAGHAGWLGWPANIQPAAELFAQIYRDAGRPAAVRGLATNVANYNAWSIASPPSYTSPNPNYDEKHYIEAFAPLLRNQGFDAKFIVDTGRNGKQPTGQLEWGHWCNVKGTGFGVRPTANTGHELVDAFVWVKPGGESDGTSADTSAARYDYHCGLSDALTPAPEAGQWFQAYFEQLLINANPPL

SEQ ID NO: 327 - DNA, 1599 bp, Aspergillus fumigatus
atgctggcctccaccttctcctaccgcatgtacaagaccgcgctcatcctggccgcccttctgggctctggccaggctcagcaggtcggtacttcccaggcggaagtgcatccgtccatgacctggcagagctgcacggctggcggcagctgcaccaccaacaacggcaaggtggtcatcgacgcgaactggcgttgggtgcacaaagtcggcgactacaccaactgctacaccggcaacacctgggacacgactatctgccctgacgatgcgacctgcgcatccaactgcgcccttgagggtgccaactacgaatccacctatggtgtgaccgccagcggcaattccctccgcctcaacttcgtcaccaccagccagcagaagaacattggctcgcgtctgtacatgatgaaggacgactcgacctacgagatgtttaagctgctgaaccaggagttcaccttcgatgtcgatgtctccaacctcccctgcggtctcaacggtgctctgtactttgtcgccatggacgccgacggtggcatgtccaagtacccaaccaacaaggccggtgccaagtacggtactggatactgtgactcgcagtgccctcgcgacctcaagttcatcaacggtcaggccaacgtcgaagggtggcagccctcctccaacgatgccaatgcgggtaccggcaaccacgggtcctgctgcgcggagatggatatctgggaggccaacagcatctccacggccttcaccccccatccgtgcgacacgcccggccaggtgatgtgcaccggtgatgcctgcggtggcacctacagctccgaccgctacggcggcacctgcgaccccgacggatgtgatttcaactccttccgccagggcaacaagaccttctacggccctggcatgaccgtcgacaccaagagcaagtttaccgtcgtcacccagttcatcaccgacgacggcacctccagcggcaccctcaaggagatcaagcgcttctacgtgcagaacggcaaggtgatccccaactcggagtcgacctggaccggcgtcagcggcaactccatcaccaccgagtactgcaccgcccagaagagcctgttccaggaccagaacgtcttcgaaaagcacggcggcctcgagggcatgggtgctgccctcgcccagggtatggttctcgtcatgtccctgtgggatgatcactcggccaacatgctctggctcgacagcaactacccgaccactgcctcttccaccactcccggcgtcgcccgtggtacctgcgacatctcctccggcgtccctgcggatgtcgaggcgaaccaccccgacgcctacgtcgtctactccaacatcaaggtcggccccatcggctcgaccttcaacagcggtggctcgaaccccggtggcggaaccaccacgacaactaccacccagcctactaccaccacgaccacggctggaaaccctggcggcaccggagtcgcacagcactatggccagtgtggtggaatcggatggaccggacccacaacctgtgccagcccttatacctgccagaagctgaatgattattactctcagtgcctgtag

SEQ ID NO: 328 - protein, 532 aa, Aspergillus fumigatus
MLASTFSYRMYKTALILAALLGSGQAQQVGTSQAEVHPSMTWQSCTAGGSCTTNNGKVVIDANWRWVHKVGDYTNCYTGNTWDTTICPDDATCASNCALEGANYESTYGVTASGNSLRLNFVTTSQQKNIGSRLYMMKDDSTYEMFKLLNQEFTFDVDVSNLPCGLNGALYFVAMDADGGMSKYPTNKAGAKYGTGYCDSQCPRDLKFINGQANVEGWQPSSNDANAGTGNHGSCCAEMDIWEANSISTAFTPHPCDTPGQVMCTGDACGGTYSSDRYGGTCDPDGCDFNSFRQGNKTFYGPGMTVDTKSKFTVVTQFITDDGTSSGTLKEIKRFYVQNGKVIPNSESTWTGVSGNSITTEYCTAQKSLFQDQNVFEKHGGLEGMGAALAQGMVLVMSLWDDHSANMLWLDSNYPTTASSTTPGVARGTCDISSGVPADVEANHPDAYVVYSNIKVGPIGSTFNSGGSNPGGGTTTTTTTQPTTTTTTAGNPGGTGVAQHYGQCGGIGWTGPTTCASPYTCQKLNDYYSQCL

SEQ ID NO: 329 - DNA, 1713 bp, Aspergillus fumigatus
atgaagcaccttgcatcttccatcgcattgactctactgttgcctgccgtgcaggcccagcagaccgtatggggccaatgtatgttctggctgtcactggaataagactgtatcaactgctgatatgcttctaggtggcggccaaggctggtctggcccgacgagctgtgttgccggcgcagcctgtagcacactgaatccctgtatgttagatatcgtcctgagtggagacttatactgacttccttagactacgctcagtgtatcccgggagccaccgcgacgtccaccaccctcacgacgacgacggcggcgacgacgacatcccagaccaccaccaaacctaccacgactggtccaactacatccgcacccaccgtgaccgcatccggtaaccctttcagcggctaccagctgtatgccaacccctactactcctccgaggtccatactctggccatgccttctctgcccagctcgctgcagcccaaggctagtgctgttgctgaagtgccctcatttgtttggctgtaagtggccttatcccaatactgagaccaactctctgacagtcgtagcgacgttgccgccaaggtgcccactatgggaacctacctggccgacattcaggccaagaacaaggccggcgccaaccctcctatcgctggtatcttcgtggtctacgacttgccggaccgtgactgcgccgctctggccagtaatggcgagtactcaattgccaacaacggtgtggccaactacaaggcgtacattgacgccatccgtgctcagctggtgaagtactctgacgttcacaccatcctcgtcatcggtaggccgtacacctccgttgcgcgccgcctttctctgacatcttgcagaacccgacagcttggccaacctggtgaccaacctcaacgtcgccaaatgcgccaatgcgcagagcgcctacctggagtgtgtcgactatgctctgaagcagctcaacctgcccaacgtcgccatgtacctcgacgcaggtatgcctcacttcccgcattctgtatcccttccagacactaactcatcaggccatgcgggctggctcggatggcccgccaacttgggccccgccgcaacactcttcgccaaagtctacaccgacgcgggttcccccgcggctgttcgtggcctggccaccaacgtcgccaactacaacgcctggtcgctcagtacctgcccctcctacacccagggagaccccaactgcgacgagaagaagtacatcaacgccatggcgcctcttctcaaggaagccggcttcgatgcccacttcatcatggatacctgtaagtgcttattccaatcgccgatgtgtgccgactaatcaatgtttcagcccggaatggcgtccagcccacgaagcaaaacgcctggggtgactggtgcaacgtcatcggcaccggcttcggtgttcgcccctcgactaacaccggcgatccgctccaggatgcctttgtgtggatcaagcccggtggagagagtgatggcacgtccaactcgacttccccccggtatgacgcgcactgcggatatagtgatgctctgcagcctgctcctgaggctggtacttggttccaggtatgtcatccattagccagatgagggataagtgactgacggacctaggcctactttgagcagcttctgaccaacgctaacccgtccttttaa

SEQ ID NO: 330 - protein, 454 aa, Aspergillus fumigatus
MKHLASSIALTLLLPAVQAQQTVWGQCGGQGWSGPTSCVAGAACSTLNPYYAQCIPGATATSTTLTTTTAATTTSQTTTKPTTTGPTTSAPTVTASGNPFSGYQLYANPYYSSEVHTLAMPSLPSSLQPKASAVAEVPSFVWLDVAAKVPTMGTYLADIQAKNKAGANPPIAGIFVVYDLPDRDCAALASNGEYSIANNGVANYKAYIDAIRAQLVKYSDVHTILVIEPDSLANLVTNLNVAKCANAQSAYLECVDYALKQLNLPNVAMYLDAGHAGWLGWPANLGPAATLFAKVYTDAGSPAAVRGLATNVANYNAWSLSTCPSYTQGDPNCDEKKYINAMAPLLKEAGFDAHFIMDTSRNGVQPTKQNAWGDWCNVIGTGFGVRPSTNTGDPLQDAFVWIKPGGESDGTSNSTSPRYDAHCGYSDALQPAPEAGTWFQAYFEQLLTNANPSF

SEQ ID NO: 331 - DNA, 2586 bp, Aspergillus oryzae
atgaagcttggttggatcgaggtggccgcattggcggctgcctcagtagtcagtgccaaggatgatctcgcgtactcccctcctttctacccttccccatgggcagatggtcagggtgaatgggcggaagtatacaaacgcgctgtagacatagtttcccagatgacgttgacagagaaagtcaacttaacgactggaacaggatggcaactagagaggtgtgttggacaaactggcagtgttcccagactcaacatccccagcttgtgtttgcaggatagtcctcttggtattcgtttctcggactacaattcagctttccctgcgggtgttaatgtcgctgccacctgggacaagacgctcgcctaccttcgtggtcaggcaatgggtgaggagttcagtgataagggtattgacgttcagctgggtcctgctgctggccctctcggtgctcatccggatggcggtagaaactgggaaggtttctcaccagatccagccctcaccggtgtactttttgcggagacgattaagggtattcaagatgctggtgtcattgcgacagctaagcattatatcatgaacgaacaagagcatttccgccaacaacccgaggctgcgggttacggattcaacgtaagcgacagtttgagttccaacgttgatgacaagactatgcatgaattgtacctctggcccttcgcggatgcagtacgcgctggagtcggtgctgtcatgtgctcttacaaccaaatcaacaacagctacggttgcgagaatagcgaaactctgaacaagcttttgaaggcggagcttggtttccaaggcttcgtcatgagtgattggaccgctcatcacagcggcgtaggcgctgctttagcaggtctggatatgtcgatgcccggtgatgttaccttcgatagtggtacgtctttctggggtgcaaacttgacggtcggtgtccttaacggtacaatcccccaatggcgtgttgatgacatggctgtccgtatcatggccgcttattacaaggttggccgcgacaccaaatacacccctcccaacttcagctcgtggaccagggacgaatatggtttcgcgcataaccatgtttcggaaggtgcttacgagagggtcaacgaattcgtggacgtgcaacgcgatcatgccgacctaatccgtcgcatcggcgcgcagagcactgttctgctgaagaacaagggtgccttgcccttgagccgcaaggaaaagctggtcgcccttctgggagaggatgcgggttccaactcgtggggcgctaacggctgtgatgaccgtggttgcgataacggtacccttgccatggcctggggtagcggtactgcgaatttcccatacctcgtgacaccagagcaggcgattcagaacgaagttcttcagggccgtggtaatgtcttcgccgtgaccgacagttgggcgctcgacaagatcgctgcggctgcccgccaggccagcgtatctctcgtgttcgtcaactccgactcaggagaaggctatcttagtgtggatggaaatgagggcgatcgtaacaacatcactctgtggaagaacggcgacaatgtggtcaagaccgcagcgaataactgtaacaacaccgttgtcatcatccactccgtcggaccagttttgatcgatgaatggtatgaccaccccaatgtcactggtattctctgggctggtctgccaggccaggagtctggtaactccattgccgatgtgctgtacggtcgtgtcaaccctggcgccaagtctcctttcacttggggcaagacccgggagtcgtatggttctcccttggtcaaggatgccaacaatggcaacggagcgccccagtctgatttcacccagggtgttttcatcgattaccgccatttcgataagttcaatgagacccctatctacgagtttggctacggcttgagctacaccaccttcgagctctccgacctccatgttcagcccctgaacgcgtcccgatacactcccaccagtggcatgactgaagctgcaaagaactttggtgaaattggcgatgcgtcggagtacgtgtatccggaggggctggaaaggatccatgagtttatctatccctggatcaactctaccgacctgaaggcatcgtctgacgattctaactacggctgggaagactccaagtatattcccgaaggcgccacggatgggtctgcccagccccgtttgcccgctagtggtggtgccggaggaaaccccggtctgtacgaggatcttttccgcgtctctgtgaaggtcaagaacacgggcaatgtcgccggtgatgaagttcctcagctgtacgtttccctaggcggcccgaatgagcccaaggtggtactgcgcaagtttgagcgtattcacttggccccttcgcaggaggccgtgtggacaacgacccttacccgtcgtgaccttgcaaactgggacgtttcggctcaggactggaccgtcactccttaccccaagacgatctacgttggaaactcctcacggaaactgccgctccaggcctcgctgcctaaggcccagtaa

SEQ ID NO: 332 - protein, 861 aa, Aspergillus oryzae
MKLGWIEVAALAAASVVSAKDDLAYSPPFYPSPWADGQGEWAEVYKRAVDIVSQMTLTEKVNLTTGTGWQLERCVGQTGSVPRLNIPSLCLQDSPLGIRFSDYNSAFPAGVNVAATWDKTLAYLRGQAMGEEFSDKGIDVQLGPAAGPLGAHPDGGRNWEGFSPDPALTGVLFAETIKGIQDAGVIATAKHYIMNEQEHFRQQPEAAGYGFNVSDSLSSNVDDKTMHELYLWPFADAVRAGVGAVMCSYNQINNSYGCENSETLNKLLKAELGFQGFVMSDWTAHHSGVGAALAGLDMSMPGDVTFDSGTSFWGANLTVGVLNGTIPQWRVDDMAVRIMAAYYKVGRDTKYTPPNFSSWTRDEYGFAHNHVSEGAYERVNEFVDVQRDHADLIRRIGAQSTVLLKNKGALPLSRKEKLVALLGEDAGSNSWGANGCDDRGCDNGTLAMAWGSGTANFPYLVTPEQAIQNEVLQGRGNVFAVTDSWALDKIAAAARQASVSLVFVNSDSGEGYLSVDGNEGDRNNITLWKNGDNVVKTAANNCNNTVVIIHSVGPVLIDEWYDHPNVTGILWAGLPGQESGNSIADVLYGRVNPGAKSPFTWGKTRESYGSPLVKDANNGNGAPQSDFTQGVFIDYRHFDKFNETPIYEFGYGLSYTTFELSDLHVQPLNASRYTPTSGMTEAAKNFGEIGDASEYVYPEGLERIHEFIYPWINSTDLKASSDDSNYGWEDSKYIPEGATDGSAQPRLPASGGAGGNPGLYEDLFRVSVKVKNTGNVAGDEVPQLYVSLGGPNEPKVVLRKFERIHLAPSQEAVWTTTLTRRDLANWDVSAQDWTVTPYPKTIYVGNSSRKLPLQASLPKAQ

SEQ ID NO: 333 - DNA, 3060 bp, Aspergillus fumigatus
atgagattcggttggctcgaggtggccgctctgacggccgcttctgtagccaatgcccaggtttgtgatgctttcccgtcattgtttcggatatagttgacaatagtcatggaaataatcaggaattggctttctctccaccattctacccttcgccttgggctgatggccagggagagtgggcagatgcccatcgacgcgccgtcgagatcgtttctcagatgacactggcggagaaggttaaccttacaacgggtactgggtgggttgcgacttttttgttgacagtgagctttcttcactgaccatctacacagatgggaaatggaccgatgcgtcggtcaaaccggcagcgttcccaggtaagcttgcaattctgcaacaacgtgcaagtgtagttgctaaaacgcggtggtgcagacttggtatcaactggggtctttgtggccaggattcccctttgggtatccgtttctgtgagctatacccgcggagtctttcagtccttgtattatgtgctgatgattgtctctgtatagctgacctcaactccgccttccctgctggtactaatgtcgccgcgacatgggacaagacactcgcctaccttcgtggcaaggccatgggtgaggaattcaacgacaagggcgtggacattttgctggggcctgctgctggtcctctcggcaaatacccggacggcggcagaatctgggaaggcttctctcctgatccggttctcactggtgtacttttcgccgaaactatcaagggtatccaagacgcgggtgtgattgctactgccaagcattacattctgaatgaacaggagcatttccgacaggttggcgaggcccagggatatggttacaacatcacggagacgatcagctccaacgtggatgacaagaccatgcacgagttgtacctttggtgagtagttgacactgcaaatgaggaccttgattgatttgactgacctggaatgcaggccctttgcagatgctgtgcgcggtaagattttccgtagacttgacctcgcgacgaagaaatcgctgacgaaccatcgtagctggcgttggcgctgtcatgtgttcctacaatcaaatcaacaacagctacggttgtcaaaacagtcaaactctcaacaagctcctcaaggctgagctgggcttccaaggcttcgtcatgagtgactggagcgctcaccacagcggtgtcggcgctgccctcgctgggttggatatgtcgatgcctggagacatttccttcgacgacggactctccttctggggcacgaacctaactgtcagtgttcttaacggcaccgttccagcctggcgtgtcgatgacatggctgttcgtatcatgaccgcgtactacaaggttggtcgtgaccgtcttcgtattccccctaacttcagctcctggacccgggatgagtacggctgggagcattctgctgtctccgagggagcctggaccaaggtgaacgacttcgtcaatgtgcagcgcagtcactctcagatcatccgtgagattggtgccgctagtacagtgctcttgaagaacacgggtgctcttcctttgaccggcaaggaggttaaagtgggtgttctcggtgaagacgctggttccaacccgtggggtgctaacggctgccccgaccgcggctgtgataacggcactcttgctatggcctggggtagtggtactgccaacttcccttaccttgtcacccccgagcaggctatccagcgagaggtcatcagcaacggcggcaatgtctttgctgtgactgataacggggctctcagccagatggcagatgttgcatctcaatccaggtgagtgcgggctcttagaaaaagaacgttctctgaatgaagttttttaaccattgcgaacagcgtgtctttggtgtttgtcaacgccgactctggagagggtttcatcagtgtcgacggcaacgagggtgaccgcaaaaatctcactctgtggaagaacggcgaggccgtcattgacactgttgtcagccactgcaacaacacgattgtggttattcacagtgttgggcccgtcttgatcgaccggtggtatgataaccccaacgtcactgccatcatctgggccggcttgcccggtcaggagagtggcaactccctggtcgacgtgctctatggccgcgtcaaccccagcgccaagaccccgttcacctggggcaagactcgggagtcttacggggctcccttgctcaccgagcctaacaatggcaatggtgctccccaggatgatttcaacgagggcgtcttcattgactaccgtcactttgacaagcgcaatgagacccccatttatgagtttggccatggcttgagctacaccacctttggttactctcaccttcgggttcaggccctcaatagttcgagttcggcatatgtcccgactagcggagagaccaagcctgcgccaacctatggtgagatcggtagtgccgccgactacctgtatcccgagggtctcaaaagaattaccaagtttatttacccttggctcaactcgaccgacctcgaggattcttctgacgacccgaactacggctgggaggactcggagtacattcccgaaggcgctagggatgggtctcctcaacccctcctgaaggctggcggcgctcctggtggtaaccctaccctttatcaggatcttgttagggtgtcggccaccataaccaacactggtaacgtcgccggttatgaagtccctcaattggtgagtgacccgcatgttccttgcgttgcaatttggctaactcgcttctagtatgtttcactgggcggaccgaacgagcctcgggtcgttctgcgcaagttcgaccgaatcttcctggctcctggggagcaaaaggtttggaccacgactcttaaccgtcgtgatctcgccaattgggatgtggaggctcaggactgggtcatcacaaagtaccccaagaaagtgcacgtcggcagctcctcgcgtaagctgcctctgagagcgcctctgccccgtgtctactag

SEQ ID NO: 334 - protein, 863 aa, Aspergillus fumigatus
MRFGWLEVAALTAASVANAQELAFSPPFYPSPWADGQGEWADAHRRAVEIVSQMTLAEKVNLTTGTGWEMDRCVGQTGSVPRLGINWGLCGQDSPLGIRFSDLNSAFPAGTNVAATWDKTLAYLRGKAMGEEFNDKGVDILLGPAAGPLGKYPDGGRIWEGFSPDPVLTGVLFAETIKGIQDAGVIATAKHYILNEQEHFRQVGEAQGYGYNITETISSNVDDKTMHELYLWPFADAVRAGVGAVMCSYNQINNSYGCQNSQTLNKLLKAELGFQGFVMSDWSAHHSGVGAALAGLDMSMPGDISFDDGLSFWGTNLTVSVLNGTVPAWRVDDMAVRIMTAYYKVGRDRLRIPPNFSSWTRDEYGWEHSAVSEGAWTKVNDFVNVQRSHSQIIREIGAASTVLLKNTGALPLTGKEVKVGVLGEDAGSNPWGANGCPDRGCDNGTLAMAWGSGTANFPYLVTPEQAIQREVISNGGNVFAVTDNGALSQMADVASQSSVSLVFVNADSGEGFISVDGNEGDRKNLTLWKNGEAVIDTVVSHCNNTIVVIHSVGPVLIDRWYDNPNVTAIIWAGLPGQESGNSLVDVLYGRVNPSAKTPFTWGKTRESYGAPLLTEPNNGNGAPQDDFNEGVFIDYRHFDKRNETPIYEFGHGLSYTTFGYSHLRVQALNSSSSAYVPTSGETKPAPTYGEIGSAADYLYPEGLKRITKFIYPWLNSTDLEDSSDDPNYGWEDSEYIPEGARDGSPQPLLKAGGAPGGNPTLYQDLVRVSATITNTGNVAGYEVPQLYVSLGGPNEPRVVLRKFDRIFLAPGEQKVWTTTLNRRDLANWDVEAQDWVITKYPKKVHVGSSSRKLPLRAPLPRVY

SEQ ID NO: 335 - DNA, 2800 bp, Penicillium brasilianum
tgaaaatgcagggttctacaatctttctggctttcgcctcatgggcgagccaggttgctgccattgcgcagcccatacagaagcacgaggtttgttttatcttgctcatggacgtgctttgacttgactaattgttttacatacagcccggatttctgcacgggccccaagccatagaatcgttctcagaaccgttctacccgtcgccctggatgaatcctcacgccgagggctgggaggccgcatatcagaaagctcaagattttgtctcgcaactcactatcttggagaaaataaatctgaccaccggtgttgggtaagtctctccgactgcttctgggtcacggtgcgacgagccactgactttttgaagctgggaaaatgggccgtgtgtaggaaacactggatcaattcctcgtctcggattcaaaggattttgtacccaggattcaccacagggtgttcggttcgcagattattcctccgctttcacatctagccaaatggccgccgcaacatttgaccgctcaattctttatcaacgaggccaagccatggcacaggaacacaaggctaagggtatcacaattcaattgggccctgttgccggccctctcggtcgcatccccgagggcggccgcaactgggaaggattctcccctgatcctgtcttgactggtatagccatggctgagacaattaagggcatgcaggatactggagtgattgcttgcgctaaacattatattggaaacgagcaggagcacttccgtcaagtgggtgaagctgcgggtcacggatacactatttccgatactatttcatctaatattgacgaccgtgctatgcatgagctatacttgtggccatttgctgatgccgttcgcgctggtgtgggttctttcatgtgctcatactctcagatcaacaactcctacggatgccaaaacagtcagaccctcaacaagctcctcaagagcgaattgggcttccaaggctttgtcatgagcgattggggtgcccatcactctggagtgtcatcggcgctagctggacttgatatgagcatgccgggtgataccgaatttgattctggcttgagcttctggggctctaacctcaccattgcaattctgaacggcacggttcccgaatggcgcctggatgacatggcgatgcgaattatggctgcatacttcaaagttggccttactattgaggatcaaccagatgtcaacttcaatgcctggacccatgacacctacggatataaatacgcttatagcaaggaagattacgagcaggtcaactggcatgtcgatgttcgcagcgaccacaataagctcattcgcgagactgccgcgaagggtacagttctgctgaagaacaactttcatgctctccctctgaagcagcccaggttcgtggccgtcgttggtcaggatgccgggccaaaccccaagggccctaacggctgcgcagaccgaggatgcgaccaaggcactctcgcaatgggatggggctcagggtctaccgaattcccttacctggtcactcctgacactgctattcagtcaaaggtcctcgaatacgggggtcgatacgagagtatttttgataactatgacgacaatgctatcttgtcgcttgtctcacagcctgatgcaacctgtatcgtttttgcaaatgccgattccggtgaaggctacatcactgtcgacaacaactggggtgaccgcaacaatctgaccctctggcaaaatgccgatcaagtgattagcactgtcagctcgcgatgcaacaacacaatcgttgttctccactctgtcggaccagtgttgctaaatggtatatatgagcacccgaacatcacagctattgtctgggcagggatgccaggcgaagaatctggcaatgctctcgtggatattctttggggcaatgttaaccctgccggtcgcactccgttcacctgggccaaaagtcgagaggactatggcactgatataatgtacgagcccaacaacggccagcgtgcgcctcagcaggatttcaccgagagcatctacctcgactaccgccatttcgacaaagctggtatcgagccaatttacgagtttggattcggcctctcctataccaccttcgaatactctgacctccgtgttgtgaagaagtatgttcaaccatacagtcccacgaccggcaccggtgctcaagcaccttccatcggacagccacctagccagaacctggatacctacaagttccctgctacatacaagtacatcaaaaccttcatttatccctacctgaacagcactgtctccctccgcgctgcttccaaggatcccgaatacggtcgtacagactttatcccaccccacgcgcgtgatggctcccctcaacctctcaaccccgctggagacccagtggccagtggtggaaacaacatgctctacgacgaactttacgaggtcactgcacagatcaaaaacactggcgacgtggccggcgacgaagtcgtccagctttacgtagatctcgggggtgacaacccgcctcgtcagttgagaaactttgacaggttttatctgctgcccggtcagagctcaacattccgggctacattgacgcgccgtgatttgagcaactgggatattgaggcgcagaactggcgagttacggaatcgcctaagagagtgtatgttggacggtcgagtcgggatttgccgctgagctcacaattggagtaatgatcatgtctaccaatagatgttgaatgtctggtgtggatatt

SEQ ID NO: 336 - protein, 878 aa, Penicillium brasilianum
MQGSTIFLAFASWASQVAAIAQPIQKHEPGFLHGPQAIESFSEPFYPSPWMNPHAEGWEAAYQKAQDFVSQLTILEKINLTTGVGWENGPCVGNTGSIPRLGFKGFCTQDSPQGVRFADYSSAFTSSQMAAATFDRSILYQRGQAMAQEHKAKGITIQLGPVAGPLGRIPEGGRNWEGFSPDPVLTGIAMAETIKGMQDTGVIACAKHYIGNEQEHFRQVGEAAGHGYTISDTISSNIDDRAMHELYLWPFADAVRAGVGSFMCSYSQINNSYGCQNSQTLNKLLKSELGFQGFVMSDWGAHHSGVSSALAGLDMSMPGDTEFDSGLSFWGSNLTIAILNGTVPEWRLDDMAMRIMAAYFKVGLTIEDQPDVNFNAWTHDTYGYKYAYSKEDYEQVNWHVDVRSDHNKLIRETAAKGTVLLKNNFHALPLKQPRFVAVVGQDAGPNPKGPNGCADRGCDQGTLAMGWGSGSTEFPYLVTPDTAIQSKVLEYGGRYESIFDNYDDNAILSLVSQPDATCIVFANADSGEGYITVDNNWGDRNNLTLWQNADQVISTVSSRCNNTIVVLHSVGPVLLNGIYEHPNITAIVWAGMPGEESGNALVDILWGNVNPAGRTPFTWAKSREDYGTDIMYEPNNGQRAPQQDFTESIYLDYRHFDKAGIEPIYEFGFGLSYTTFEYSDLRVVKKYVQPYSPTTGTGAQAPSIGQPPSQNLDTYKFPATYKYIKTFIYPYLNSTVSLRAASKDPEYGRTDFIPPHARDGSPQPLNPAGDPVASGGNNMLYDELYEVTAQIKNTGDVAGDEVVQLYVDLGGDNPPRQLRNFDRFYLLPGQSSTFRATLTRRDLSNWDIEAQNWRVTESPKRVYVGRSSRDLPLSSQLE

SEQ ID NO: 337 - DNA, 2583 bp, Aspergillus niger
atgaggttcactttgatcgaggcggtggctctgactgccgtctcgctggccagcgctgatgaattggcctactccccaccgtattacccatccccttgggccaatggccagggcgactgggcgcaggcataccagcgcgctgttgatattgtctcgcaaatgacattggatgagaaggtcaatctgaccacaggaactggatgggaattggaactatgtgttggtcagactggcggtgttccccgattgggagttccgggaatgtgtttacaggatagccctctgggcgttcgcgactccgactacaactctgctttccctgccggcatgaacgtggctgcaacctgggacaagaatctggcataccttcgcggcaaggctatgggtcaggaatttagtgacaagggtgccgatatccaattgggtccagctgccggccctctcggtagaagtcccgacggtggtcgtaactgggagggcttctccccagaccctgccctaagtggtgtgctctttgccgagaccatcaagggtatccaagatgctggtgtggttgcgacggctaagcactacattgcttacgagcaagagcatttccgtcaggcgcctgaagcccaaggttttggatttaatatttccgagagtggaagtgcgaacctcgatgataagactatgcacgagctgtacctctggcccttcgcggatgccatccgtgcaggtgctggcgctgtgatgtgctcctacaaccagatcaacaacagttatggctgccagaacagctacactctgaacaagctgctcaaggccgagctgggcttccagggctttgtcatgagtgattgggctgctcaccatgctggtgtgagtggtgctttggcaggattggatatgtctatgccaggagacgtcgactacgacagtggtacgtcttactggggtacaaacttgaccattagcgtgctcaacggaacggtgccccaatggcgtgttgatgacatggctgtccgcatcatggccgcctactacaaggtcggccgtgaccgtctgtggactcctcccaacttcagctcatggaccagagatgaatacggctacaagtactactacgtgtcggagggaccgtacgagaaggtcaaccagtacgtgaatgtgcaacgcaaccacagcgaactgattcgccgcattggagcggacagcacggtgctcctcaagaacgacggcgctctgcctttgactggtaaggagcgcctggtcgcgcttatcggagaagatgcgggctccaacccttatggtgccaacggctgcagtgaccgtggatgcgacaatggaacattggcgatgggctggggaagtggtactgccaacttcccatacctggtgacccccgagcaggccatctcaaacgaggtgcttaagcacaagaatggtgtattcaccgccaccgataactgggctatcgatcagattgaggcgcttgctaagaccgccagtgtctctcttgtctttgtcaacgccgactctggtgagggttacatcaatgtggacggaaacctgggtgaccgcaggaacctgaccctgtggaggaacggcgataatgtgatcaaggctgctgctagcaactgcaacaacacaatcgttgtcattcactctgtcggaccagtcttggttaacgagtggtacgacaaccccaatgttaccgctatcctctggggtggtttgcccggtcaggagtctggcaactctcttgccgacgtcctctatggccgtgtcaaccccggtgccaagtcgccctttacctggggcaagactcgtgaggcctaccaagactacttggtcaccgagcccaacaacggcaacggagcccctcaggaagactttgtcgagggcgtcttcattgactaccgtggatttgacaagcgcaacgagaccccgatctacgagttcggctatggtctgagctacaccactttcaactactcgaaccttgaggtgcaggtgctgagcgcccctgcatacgagcctgcttcgggtgagaccgaggcagcgccaaccttcggagaggttggaaatgcgtcggattacctctaccccagcggattgcagagaattaccaagttcatctacccctggctcaacggtaccgatctcgaggcatcttccggggatgctagctacgggcaggactcctccgactatcttcccgagggagccaccgatggctctgcgcaaccgatcctgcctgccggtggcggtcctggcggcaaccctcgcctgtacgacgagctcatccgcgtgtcagtgaccatcaagaacaccggcaaggttgctggtgatgaagttccccaactgtatgtttcccttggcggtcccaatgagcccaagatcgtgctgcgtcaattcgagcgcatcacgctgcagccgtcggaggagacgaagtggagcacgactctgacgcgccgtgaccttgcaaactggaatgttgagaagcaggactgggagattacgtcgtatcccaagatggtgtttgtcggaagctcctcgcggaagctgccgctccgggcgtctctgcctactgttcactaa

SEQ ID NO: 338 - protein, 860 aa, Aspergillus niger
MRFTLIEAVALTAVSLASADELAYSPPYYPSPWANGQGDWAQAYQRAVDIVSQMTLDEKVNLTTGTGWELELCVGQTGGVPRLGVPGMCLQDSPLGVRDSDYNSAFPAGMNVAATWDKNLAYLRGKAMGQEFSDKGADIQLGPAAGPLGRSPDGGRNWEGFSPDPALSGVLFAETIKGIQDAGVVATAKHYIAYEQEHFRQAPEAQGFGFNISESGSANLDDKTMHELYLWPFADAIRAGAGAVMCSYNQINNSYGCQNSYTLNKLLKAELGFQGFVMSDWAAHHAGVSGALAGLDMSMPGDVDYDSGTSYWGTNLTISVLNGTVPQWRVDDMAVRIMAAYYKVGRDRLWTPPNFSSWTRDEYGYKYYYVSEGPYEKVNQYVNVQRNHSELIRRIGADSTVLLKNDGALPLTGKERLVALIGEDAGSNPYGANGCSDRGCDNGTLAMGWGSGTANFPYLVTPEQAISNEVLKHKNGVFTATDNWAIDQIEALAKTASVSLVFVNADSGEGYINVDGNLGDRRNLTLWRNGDNVIKAAASNCNNTIVVIHSVGPVLVNEWYDNPNVTAILWGGLPGQESGNSLADVLYGRVNPGAKSPFTWGKTREAYQDYLVTEPNNGNGAPQEDFVEGVFIDYRGFDKRNETPIYEFGYGLSYTTFNYSNLEVQVLSAPAYEPASGETEAAPTFGEVGNASDYLYPSGLQRITKFIYPWLNGTDLEASSGDASYGQDSSDYLPEGATDGSAQPILPAGGGPGGNPRLYDELIRVSVTIKNTGKVAGDEVPQLYVSLGGPNEPKIVLRQFERITLQPSEETKWSTTLTRRDLANWNVEKQDWEITSYPKMVFVGSSSRKLPLRASLPTVH

SEQ ID NO: 339 - DNA, 2583 bp, Aspergillus aculeatus
atgaagctcagttggcttgaggcggctgccttgacggctgcttcagtcgtcagcgctgatgaactggcgttctctcctcctttctacccctctccgtgggccaatggccagggagagtgggcggaagcctaccagcgtgcagtggccattgtatcccagatgactctggatgagaaggtcaacctgaccaccggaactggatgggagctggagaagtgcgtcggtcagactggtggtgtcccaagactgaacatcggtggcatgtgtcttcaggacagtcccttgggaattcgtgatagtgactacaattcggctttccctgctggtgtcaacgttgctgcgacatgggacaagaaccttgcttatctacgtggtcaggctatgggtcaagagttcagtgacaaaggaattgatgttcaattgggaccggccgcgggtcccctcggcaggagccctgatggaggtcgcaactgggaaggtttctctccagacccggctcttactggtgtgctctttgcggagacgattaagggtattcaagacgctggtgtcgtggcgacagccaagcattacattctcaatgagcaagagcatttccgccaggtcgcagaggctgcgggctacggattcaatatctccgacacgatcagctctaacgttgatgacaagaccattcatgaaatgtacctctggcccttcgcggatgccgttcgcgccggcgttggcgccatcatgtgttcctacaaccagatcaacaacagctacggttgccagaacagttacactctgaacaagcttctgaaggccgagctcggcttccagggctttgtgatgtctgactggggtgctcaccacagtggtgttggctctgctttggccggcttggatatgtcaatgcctggcgatatcaccttcgattctgccactagtttctggggtaccaacctgaccattgctgtgctcaacggtaccgtcccgcagtggcgcgttgacgacatggctgtccgtatcatggctgcctactacaaggttggccgcgaccgcctgtaccagccgcctaacttcagctcctggactcgcgatgaatacggcttcaagtatttctacccccaggaagggccctatgagaaggtcaatcactttgtcaatgtgcagcgcaaccacagcgaggttattcgcaagttgggagcagacagtactgttctactgaagaacaacaatgccctgccgctgaccggaaaggagcgcaaagttgcgatcctgggtgaagatgctggatccaactcgtacggtgccaatggctgctctgaccgtggctgtgacaacggtactcttgctatggcttggggtagcggcactgccgaattcccatatctcgtgacccctgagcaggctattcaagccgaggtgctcaagcataagggcagcgtctacgccatcacggacaactgggcgctgagccaggtggagaccctcgctaaacaagccagtgtctctcttgtatttgtcaactcggacgcgggagagggctatatctccgtggacggaaacgagggcgaccgcaacaacctcaccctctggaagaacggcgacaacctcatcaaggctgctgcaaacaactgcaacaacaccatcgttgtcatccactccgttggacctgttttggttgacgagtggtatgaccaccccaacgttactgccatcctctgggcgggcttgcctggccaggagtctggcaactccttggctgacgtgctctacggccgcgtcaacccgggcgccaaatctccattcacctggggcaagacgagggaggcgtacggggattaccttgtccgtgagctcaacaacggcaacggagctccccaagatgatttctcggaaggtgttttcattgactaccgcggattcgacaagcgcaatgagaccccgatctacgagttcggacatggtctgagctacaccactttcaactactctggccttcacatccaggttctcaacgcttcctccaacgctcaagtagccactgagactggcgccgctcccaccttcggacaagtcggcaatgcctctgactacgtgtaccctgagggattgaccagaatcagcaagttcatctatccctggcttaattccacagacctgaaggcctcatctggcgacccgtactatggagtcgacaccgcggagcacgtgcccgagggtgctactgatggctctccgcagcccgttctgcctgccggtggtggctctggtggtaacccgcgcctctacgatgagttgatccgtgtttcggtgacagtcaagaacactggtcgtgttgccggtgatgctgtgcctcaattgtatgtttcccttggtggacccaatgagcccaaggttgtgttgcgcaaattcgaccgcctcaccctcaagccctccgaggagacggtgtggacgactaccctgacccgccgcgatctgtctaactgggacgttgcggctcaggactgggtcatcacttcttacccgaagaaggtccatgttggtagctcttcgcgtcagctgccccttcacgcggcgctcccgaaggtgcaatga

SEQ ID NO: 340 - protein, 860 aa, Aspergillus aculeatus
MKLSWLEAAALTAASVVSADELAFSPPFYPSPWANGQGEWAEAYQRAVAIVSQMTLDEKVNLTTGTGWELEKCVGQTGGVPRLNIGGMCLQDSPLGIRDSDYNSAFPAGVNVAATWDKNLAYLRGQAMGQEFSDKGIDVQLGPAAGPLGRSPDGGRNWEGFSPDPALTGVLFAETIKGIQDAGVVATAKHYILNEQEHFRQVAEAAGYGFNISDTISSNVDDKTIHEMYLWPFADAVRAGVGAIMCSYNQINNSYGCQNSYTLNKLLKAELGFQGFVMSDWGAHHSGVGSALAGLDMSMPGDITFDSATSFWGTNLTIAVLNGTVPQWRVDDMAVRIMAAYYKVGRDRLYQPPNFSSWTRDEYGFKYFYPQEGPYEKVNHFVNVQRNHSEVIRKLGADSTVLLKNNNALPLTGKERKVAILGEDAGSNSYGANGCSDRGCDNGTLAMAWGSGTAEFPYLVTPEQAIQAEVLKHKGSVYAITDNWALSQVETLAKQASVSLVFVNSDAGEGYISVDGNEGDRNNLTLWKNGDNLIKAAANNCNNTIVVIHSVGPVLVDEWYDHPNVTAILWAGLPGQESGNSLADVLYGRVNPGAKSPFTWGKTREAYGDYLVRELNNGNGAPQDDFSEGVFIDYRGFDKRNETPIYEFGHGLSYTTFNYSGLHIQVLNASSNAQVATETGAAPTFGQVGNASDYVYPEGLTRISKFIYPWLNSTDLKASSGDPYYGVDTAEHVPEGATDGSPQPVLPAGGGSGGNPRLYDELIRVSVTVKNTGRVAGDAVPQLYVSLGGPNEPKVVLRKFDRLTLKPSEETVWTTTLTRRDLSNWDVAAQDWVITSYPKKVHVGSSSRQLPLHAALPKVQ

SEQ ID NO: 341 - DNA, 3294 bp, Aspergillus oryzae
atgcgttcctcccccctcctccgctccgccgttgtggccgccctgccggtgttggcccttgccgctgatggcaggtccacccgctactgggactgctgcaagccttcgtgcggctgggccaagaaggctcccgtgaaccagcctgtcttttcctgcaacgccaacttccagcgtatcacggacttcgacgccaagtccggctgcgagccgggcggtgtcgcctactcgtgcgccgaccagaccccatgggctgtgaacgacgacttcgcgctcggttttgctgccacctctattgccggcagcaatgaggcgggctggtgctgcgcctgctacgagctcaccttcacatccggtcctgttgctggcaagaagatggtcgtccagtccaccagcactggcggtgatcttggcagcaaccacttcgatctcaacatccccggcggcggcgtcggcatcttcgacggatgcactccccagttcggtggtctgcccggccagcgctacggcggcatctcgtcccgcaacgagtgcgatcggttccccgacgccctcaagcccggctgctactggcgcttcgactggttcaagaacgccgacaatccgagcttcagcttccgtcaggtccagtgcccagccgagctcgtcgctcgcaccggatgccgccgcaacgacgacggcaacttccctgccgtccagatccccatgcgttcctcccccctcctccgctccgccgttgtggccgccctgccggtgttggcccttgccaaggatgatctcgcgtactcccctcctttctacccttccccatgggcagatggtcagggtgaatgggcggaagtatacaaacgcgctgtagacatagtttcccagatgacgttgacagagaaagtcaacttaacgactggaacaggatggcaactagagaggtgtgttggacaaactggcagtgttcccagactcaacatccccagcttgtgtttgcaggatagtcctcttggtattcgtttctcggactacaattcagctttccctgcgggtgttaatgtcgctgccacctgggacaagacgctcgcctaccttcgtggtcaggcaatgggtgaggagttcagtgataagggtattgacgttcagctgggtcctgctgctggccctctcggtgctcatccggatggcggtagaaactgggaaggtttctcaccagatccagccctcaccggtgtactttttgcggagacgattaagggtattcaagatgctggtgtcattgcgacagctaagcattatatcatgaacgaacaagagcatttccgccaacaacccgaggctgcgggttacggattcaacgtaagcgacagtttgagttccaacgttgatgacaagactatgcatgaattgtacctctggcccttcgcggatgcagtacgcgctggagtcggtgctgtcatgtgctcttacaaccaaatcaacaacagctacggttgcgagaatagcgaaactctgaacaagcttttgaaggcggagcttggtttccaaggcttcgtcatgagtgattggaccgctcatcacagcggcgtaggcgctgctttagcaggtctggatatgtcgatgcccggtgatgttaccttcgatagtggtacgtctttctggggtgcaaacttgacggtcggtgtccttaacggtacaatcccccaatggcgtgttgatgacatggctgtccgtatcatggccgcttattacaaggttggccgcgacaccaaatacacccctcccaacttcagctcgtggaccagggacgaatatggtttcgcgcataaccatgtttcggaaggtgcttacgagagggtcaacgaattcgtggacgtgcaacgcgatcatgccgacctaatccgtcgcatcggcgcgcagagcactgttctgctgaagaacaagggtgccttgcccttgagccgcaaggaaaagctggtcgcccttctgggagaggatgcgggttccaactcgtggggcgctaacggctgtgatgaccgtggttgcgataacggtacccttgccatggcctggggtagcggtactgcgaatttcccatacctcgtgacaccagagcaggcgattcagaacgaagttcttcagggccgtggtaatgtcttcgccgtgaccgacagttgggcgctcgacaagatcgctgcggctgcccgccaggccagcgtatctctcgtgttcgtcaactccgactcaggagaaggctatcttagtgtggatggaaatgagggcgatcgtaacaacatcactctgtggaagaacggcgacaatgtggtcaagaccgcagcgaataactgtaacaacaccgttgtcatcatccactccgtcggaccagttttgatcgatgaatggtatgaccaccccaatgtcactggtattctctgggctggtctgccaggccaggagtctggtaactccattgccgatgtgctgtacggtcgtgtcaaccctggcgccaagtctcctttcacttggggcaagacccgggagtcgtatggttctcccttggtcaaggatgccaacaatggcaacggagcgccccagtctgatttcacccagggtgttttcatcgattaccgccatttcgataagttcaatgagacccctatctacgagtttggctacggcttgagctacaccaccttcgagctctccgacctccatgttcagcccctgaacgcgtcccgatacactcccaccagtggcatgactgaagctgcaaagaactttggtgaaattggcgatgcgtcggagtacgtgtatccggaggggctggaaaggatccatgagtttatctatccctggatcaactctaccgacctgaaggcatcgtctgacgattctaactacggctgggaagactccaagtatattcccgaaggcgccacggatgggtctgcccagccccgtttgcccgctagtggtggtgccggaggaaaccccggtctgtacgaggatcttttccgcgtctctgtgaaggtcaagaacacgggcaatgtcgccggtgatgaagttcctcagctgtacgtttccctaggcggcccgaatgagcccaaggtggtactgcgcaagtttgagcgtattcacttggccccttcgcaggaggccgtgtggacaacgacccttacccgtcgtgaccttgcaaactgggacgtttcggctcaggactggaccgtcactccttaccccaagacgatctacgttggaaactcctcacggaaactgccgctccaggcctcgctgcctaaggcccagtaa

SEQ ID NO: 342 - protein, 1097 aa, Aspergillus oryzae
MRSSPLLRSAVVAALPVLALAADGRSTRYWDCCKPSCGWAKKAPVNQPVFSCNANFQRITDFDAKSGCEPGGVAYSCADQTPWAVNDDFALGFAATSIAGSNEAGWCCACYELTFTSGPVAGKKMVVQSTSTGGDLGSNHFDLNIPGGGVGIFDGCTPQFGGLPGQRYGGISSRNECDRFPDALKPGCYWRFDWFKNADNPSFSFRQVQCPAELVARTGCRRNDDGNFPAVQIPMRSSPLLRSAVVAALPVLALAKDDLAYSPPFYPSPWADGQGEWAEVYKRAVDIVSQMTLTEKVNLTTGTGWQLERCVGQTGSVPRLNIPSLCLQDSPLGIRFSDYNSAFPAGVNVAATWDKTLAYLRGQAMGEEFSDKGIDVQLGPAAGPLGAHPDGGRNWEGFSPDPALTGVLFAETIKGIQDAGVIATAKHYIMNEQEHFRQQPEAAGYGFNVSDSLSSNVDDKTMHELYLWPFADAVRAGVGAVMCSYNQINNSYGCENSETLNKLLKAELGFQGFVMSDWTAHHSGVGAALAGLDMSMPGDVTFDSGTSFWGANLTVGVLNGTIPQWRVDDMAVRIMAAYYKVGRDTKYTPPNFSSWTRDEYGFAHNHVSEGAYERVNEFVDVQRDHADLIRRIGAQSTVLLKNKGALPLSRKEKLVALLGEDAGSNSWGANGCDDRGCDNGTLAMAWGSGTANFPYLVTPEQAIQNEVLQGRGNVFAVTDSWALDKIAAAARQASVSLVFVNSDSGEGYLSVDGNEGDRNNITLWKNGDNVVKTAANNCNNTVVIIHSVGPVLIDEWYDHPNVTGILWAGLPGQESGNSIADVLYGRVNPGAKSPFTWGKTRESYGSPLVKDANNGNGAPQSDFTQGVFIDYRHFDKFNETPIYEFGYGLSYTTFELSDLHVQPLNASRYTPTSGMTEAAKNFGEIGDASEYVYPEGLERIHEFIYPWINSTDLKASSDDSNYGWEDSKYIPEGATDGSAQPRLPASGGAGGNPGLYEDLFRVSVKVKNTGNVAGDEVPQLYVSLGGPNEPKVVLRKFERIHLAPSQEAVWTTTLTRRDLANWDVSAQDWTVTPYPKTIYVGNSSRKLPLQASLPKAQ

SEQ ID NO: 343 - DNA, 3294 bp, Aspergillus oryzae
atgcgttcctcccccctcctccgctccgccgttgtggccgccctgccggtgttggcccttgccgctgatggcaggtccacccgctactgggactgctgcaagccttcgtgcggctgggccaagaaggctcccgtgaaccagcctgtcttttcctgcaacgccaacttccagcgtatcacggacttcgacgccaagtccggctgcgagccgggcggtgtcgcctactcgtgcgccgaccagaccccatgggctgtgaacgacgacttcgcgctcggttttgctgccacctctattgccggcagcaatgaggcgggctggtgctgcgcctgctacgagctcaccttcacatccggtcctgttgctggcaagaagatggtcgtccagtccaccagcactggcggtgatcttggcagcaaccacttcgatctcaacatccccggcggcggcgtcggcatcttcgacggatgcactccccagttcggtggtctgcccggccagcgctacggcggcatctcgtcccgcaacgagtgcgatcggttccccgacgccctcaagcccggctgctactggcgcttcgactggttcaagaacgccgacaatccgagcttcagcttccgtcaggtccagtgcccagccgagctcgtcgctcgcaccggatgccgccgcaacgacgacggcaacttccctgccgtccagatccccatgcgttcctcccccctcctccgctccgccgttgtggccgccctgccggtgttggcccttgccaaggatgatctcgcgtactcccctcctttctacccttccccatgggcagatggtcagggtgaatgggcggaagtatacaaacgcgctgtagacatagtttcccagatgacgttgacagagaaagtcaacttaacgactggaacaggatggcaactagagaggtgtgttggacaaactggcagtgttcccagactcaacatccccagcttgtgtttgcaggatagtcctcttggtattcgtttctcggactacaattcagctttccctgcgggtgttaatgtcgctgccacctgggacaagacgctcgcctaccttcgtggtcaggcaatgggtgaggagttcagtgataagggtattgacgttcagctgggtcctgctgctggccctctcggtgctcatccggatggcggtagaaactgggaaagtttctcaccagatccagccctcaccggtgtactttttgcggagacgattaagggtattcaagatgctggtgtcattgcgacagctaagcattatatcatgaacgaacaagagcatttccgccaacaacccgaggctgcgggttacggattcaacgtaagcgacagtttgagttccaacgttgatgacaagactatgcatgaattgtacctctggcccttcgcggatgcagtacgcgctggagtcggtgctgttatgtgctcttacaaccaaatcaacaacagctacggttgcgagaatagcgaaactctgaacaagcttttgaaggcggagcttggtttccaaggcttcgtcatgagtgattggaccgctcaacacagcggcgtaggcgctgctttagcaggtctggatatgtcgatgcccggtgatgttaccttcgatagtggtacgtctttctggggtgcaaacttgacggtcggtgtccttaacggtacaatcccccaatggcgtgttgatgacatggctgtccgtatcatggccgcttattacaaggttggccgcgacaccaaatacacccctcccaacttcagctcgtggaccagggacgaatatggtttcgcgcataaccatgtttcggaaggtgcttacgagagggtcaacgaattcgtggacgtgcaacgcgatcatgccgacctaatccgtcgcatcggcgcgcagagcactgttctgctgaagaacaagggtgccttgcccttgagccgcaaggaaaagctggtcgcccttctgggagaggatgcgggttccaactcgtggggcgctaacggctgtgatgaccgtggttgcgataacggtacccttgccatggcctggggtagcggtactgcgaatttcccatacctcgtgacaccagagcaggcgattcagaacgaagttcttcagggccgtggtaatgtcttcgccgtgaccgacagttgggcgctcgacaagatcgctgcggctgcccgccaggccagcgtatctctcgtgttcgtcaactccgactcaggagaaggctatcttagtgtggatggaaatgagggcgatcgtaacaacatcactctgtggaagaacggcgacaatgtggtcaagaccgcagcgaataactgtaacaacaccgttgtcatcatccactccgtcggaccagttttgatcgatgaatggtatgaccaccccaatgtcactggtattctctgggctggtctgccaggccaggagtctggtaactccattgccgatgtgctgtacggtcgtgtcaaccctggcgccaagtctcctttcacttggggcaagacccgggagtcgtatggttctcccttggtcaaggatgccaacaatggcaacggagcgccccagtctgatttcacccagggtgttttcatcgattaccgccatttcgataagttcaatgagacccctatctacgagtttggctacggcttgagctacaccaccttcgagctctccgacctccatgttcagcccctgaacgcgtcccgatacactcccaccagtggcatgactgaagctgcaaagaactttggtgaaattggcgatgcgtcggagtacgtgtatccggaggggctggaaaggatccatgagtttatctatccctggatcaactctaccgacctgaaggcatcgtctgacgattctaactacggctgggaagactccaagtatattcccgaaggcgccacggatgggtctgcccagccccgtttgcccgctagtggtggtgccggaggaaaccccggtctgtacgaggatcttttccgcgtctctgtgaaggtcaagaacacgggcaatgtcgccggtgatgaagttcctcagctgtacgtttccctaggcggcccgaatgagcccaaggtggtactgcgcaagtttgagcgtattcacttggccccttcgcaggaggccgtgtggacaacgacccttacccgtcgtgaccttgcaaactgggacgtttcggctcaggactggaccgtcactccttaccccaagacgatctacgttggaaactcctcacggaaactgccgctccaggcctcgctgcctaaggcccagtaa

SEQ ID NO: 344 - protein, 1097 aa, Aspergillus oryzae
MRSSPLLRSAVVAALPVLALAADGRSTRYWDCCKPSCGWAKKAPVNQPVFSCNANFQRITDFDAKSGCEPGGVAYSCADQTPWAVNDDFALGFAATSIAGSNEAGWCCACYELTFTSGPVAGKKMVVQSTSTGGDLGSNHFDLNIPGGGVGIFDGCTPQFGGLPGQRYGGISSRNECDRFPDALKPGCYWRFDWFKNADNPSFSFRQVQCPAELVARTGCRRNDDGNFPAVQIPMRSSPLLRSAVVAALPVLALAKDDLAYSPPFYPSPWADGQGEWAEVYKRAVDIVSQMTLTEKVNLTTGTGWQLERCVGQTGSVPRLNIPSLCLQDSPLGIRFSDYNSAFPAGVNVAATWDKTLAYLRGQAMGEEFSDKGIDVQLGPAAGPLGAHPDGGRNWESFSPDPALTGVLFAETIKGIQDAGVIATAKHYIMNEQEHFRQQPEAAGYGFNVSDSLSSNVDDKTMHELYLWPFADAVRAGVGAVMCSYNQINNSYGCENSETLNKLLKAELGFQGFVMSDWTAQHSGVGAALAGLDMSMPGDVTFDSGTSFWGANLTVGVLNGTIPQWRVDDMAVRIMAAYYKVGRDTKYTPPNFSSWTRDEYGFAHNHVSEGAYERVNEFVDVQRDHADLIRRIGAQSTVLLKNKGALPLSRKEKLVALLGEDAGSNSWGANGCDDRGCDNGTLAMAWGSGTANFPYLVTPEQAIQNEVLQGRGNVFAVTDSWALDKIAAAARQASVSLVFVNSDSGEGYLSVDGNEGDRNNITLWKNGDNVVKTAANNCNNTVVIIHSVGPVLIDEWYDHPNVTGILWAGLPGQESGNSIADVLYGRVNPGAKSPFTWGKTRESYGSPLVKDANNGNGAPQSDFTQGVFIDYRHFDKFNETPIYEFGYGLSYTTFELSDLHVQPLNASRYTPTSGMTEAAKNFGEIGDASEYVYPEGLERIHEFIYPWINSTDLKASSDDSNYGWEDSKYIPEGATDGSAQPRLPASGGAGGNPGLYEDLFRVSVKVKNTGNVAGDEVPQLYVSLGGPNEPKVVLRKFERIHLAPSQEAVWTTTLTRRDLANWDVSAQDWTVTPYPKTIYVGNSSRKLPLQASLPKAQ

SEQ ID NO: 345 - DNA, 1415 bp, Aspergillus fumigatus
atggtccatctatcttcattggcagcagccctggctgctctgcctctgtatgtttacccactcacgagaggaggaacagctttgacattgctatagtgtatatggagctggcctgaacacagcagccaaagccaaaggactaaagtactttggttccgccacggacaatccagagctcacggactctgcgtatgtcgcgcaactgagcaacaccgatgattttggtcaaatcacacccggaaactccatgaaggtttgcttacgtctgcctccctggagcattgcctcaaaagctaattggttgttttgtttggatagtgggatgccaccgagccttctcagaattctttttcgttcgcaaatggagacgccgtggtcaatctggcgaacaagaatggccagctgatgcgatgccatactctggtctggcacagtcagctaccgaactggggtatgtaaacgtcttgtctattctcaaatactctctaacagttgacagtctctagcgggtcatggaccaatgcgacccttttggcggccatgaagaatcatatcaccaatgtggttactcactacaaggggaagtgctacgcctgggatgttgtcaatgaaggtttgttgctccatctatcctcaatagttcttttgaaactgacaagcctgtcaatctagccctgaacgaggacggtactttccgtaactctgtcttctaccagatcatcggcccagcatacattcctattgcgttcgccacggctgctgccgcagatcccgacgtgaaactctactacaacgactacaacattgaatactcaggcgccaaagcgactgctgcgcagaatatcgtcaagatgatcaaggcctacggcgcgaagatcgacggcgtcggcctccaggcacactttatcgtcggcagcactccgagtcaatcggatctgacgaccgtcttgaagggctacactgctctcggcgttgaggtggcctataccgaacttgacatccgcatgcagctgccctcgaccgccgcaaagctggcccagcagtccactgacttccaaggcgtggccgcagcatgcgttagcaccactggctgcgtgggtgtcactatctgggactggaccgacaagtactcctgggtccccagcgtgttccaaggctacggcgccccattgccttgggatgagaactatgtgaagaagccagcgtacgatggcctgatggcgggtcttggagcaagcggctccggcaccacaacgaccactactactacttctactacgacaggaggtacggaccctactggagtcgctcagaaatggggacagtgtggcggtattggctggaccgggccaacaacttgtgtcagtggtaccacttgccaaaagctgaatgactggtactcacagtgcctgtaa

SEQ ID NO: 346 - protein, 397 aa, Aspergillus fumigatus
MVHLSSLAAALAALPLVYGAGLNTAAKAKGLKYFGSATDNPELTDSAYVAQLSNTDDFGQITPGNSMKWDATEPSQNSFSFANGDAVVNLANKNGQLMRCHTLVWHSQLPNWVSSGSWTNATLLAAMKNHITNVVTHYKGKCYAWDVVNEALNEDGTFRNSVFYQIIGPAYIPIAFATAAAADPDVKLYYNDYNIEYSGAKATAAQNIVKMIKAYGAKIDGVGLQAHFIVGSTPSQSDLTTVLKGYTALGVEVAYTELDIRMQLPSTAAKLAQQSTDFQGVAAACVSTTGCVGVTIWDWTDKYSWVPSVFQGYGAPLPWDENYVKKPAYDGLMAGLGASGSGTTTTTTTTSTTTGGTDPTGVAQKWGQCGGIGWTGPTTCVSGTTCQKLNDWYSQCL

SEQ ID NO: 347 - DNA, 2564 bp, Trichoderma reesei
ggacagccggacgcaatggtgaataacgcagctcttctcgccgccctgtcggctctcctgcccacggccctggcgcagaacaatcaaacatacgccaactactctgctcagggccagcctgatctctaccccgagacacttgccacgctcacactctcgttccccgactgcgaacatggccccctcaagaacaatctcgtctgtgactcatcggccggctatgtagagcgagcccaggccctcatctcgctcttcaccctcgaggagctcattctcaacacgcaaaactcgggccccggcgtgcctcgcctgggtcttccgaactaccaagtctggaatgaggctctgcacggcttggaccgcgccaacttcgccaccaagggcggccagttcgaatgggcgacctcgttccccatgcccatcctcactacggcggccctcaaccgcacattgatccaccagattgccgacatcatctcgacccaagctcgagcattcagcaacagcggccgttacggtctcgacgtctatgcgccaaacgtcaatggcttccgaagccccctctggggccgtggccaggagacgcccggcgaagacgcctttttcctcagctccgcctatacttacgagtacatcacgggcatccagggtggcgtcgaccctgagcacctcaaggttgccgccacggtgaagcactttgccggatacgacctcgagaactggaacaaccagtcccgtctcggtttcgacgccatcataactcagcaggacctctccgaatactacactccccagttcctcgctgcggcccgttatgcaaagtcacgcagcttgatgtgcgcatacaactccgtcaacggcgtgcccagctgtgccaacagcttcttcctgcagacgcttttgcgcgagagctggggcttccccgaatggggatacgtctcgtccgattgcgatgccgtctacaacgttttcaaccctcatgactacgccagcaaccagtcgtcagccgccgccagctcactgcgagccggcaccgatatcgactgcggtcagacttacccgtggcacctcaacgagtcctttgtggccggcgaagtctcccgcggcgagatcgagcggtccgtcacccgtctgtacgccaacctcgtccgtctcggatacttcgacaagaagaaccagtaccgctcgctcggttggaaggatgtcgtcaagactgatgcctggaacatctcgtacgaggctgctgttgagggcatcgtcctgctcaagaacgatggcactctccctctgtccaagaaggtgcgcagcattgctctgatcggaccatgggccaatgccacaacccaaatgcaaggcaactactatggccctgccccatacctcatcagccctctggaagctgctaagaaggccggctatcacgtcaactttgaactcggcacagagatcgccggcaacagcaccactggctttgccaaggccattgctgccgccaagaagtcggatgccatcatctacctcggtggaattgacaacaccattgaacaggagggcgctgaccgcacggacattgcttggcccggtaatcagctggatctcatcaagcagctcagcgaggtcggcaaaccccttgtcgtcctgcaaatgggcggtggtcaggtagactcatcctcgctcaagagcaacaagaaggtcaactccctcgtctggggcggatatcccggccagtcgggaggcgttgccctcttcgacattctctctggcaagcgtgctcctgccggccgactggtcaccactcagtacccggctgagtatgttcaccaattcccccagaatgacatgaacctccgacccgatggaaagtcaaaccctggacagacttacatctggtacaccggcaaacccgtctacgagtttggcagtggtctcttctacaccaccttcaaggagactctcgccagccaccccaagagcctcaagttcaacacctcatcgatcctctctgctcctcaccccggatacacttacagcgagcagattcccgtcttcaccttcgaggccaacatcaagaactcgggcaagacggagtccccatatacggccatgctgtttgttcgcacaagcaacgctggcccagccccgtacccgaacaagtggctcgtcggattcgaccgacttgccgacatcaagcctggtcactcttccaagctcagcatccccatccctgtcagtgctctcgcccgtgttgattctcacggaaaccggattgtataccccggcaagtatgagctagccttgaacaccgacgagtctgtgaagcttgagtttgagttggtgggagaagaggtaacgattgagaactggccgttggaggagcaacagatcaaggatgctacacctgacgcataagggttttaatgatgttgttatgacaaacgggtagagtagttaatgatggaataggaagaggccatagttttctgtttgcaaaccatttttgccattgcgaaaaaaaaaaaaaaaaaaaaaaaaaaaaaaaaaaaaaaaaaaaaaaaaaaaaaaaa

SEQ ID NO: 348 - protein, 780 aa, Trichoderma reesei
MVNNAALLAALSALLPTALAQNNQTYANYSAQGQPDLYPETLATLTLSFPDCEHGPLKNNLVCDSSAGYVERAQALISLFTLEELILNTQNSGPGVPRLGLPNYQVWNEALHGLDRANFATKGGQFEWATSFPMPILTTAALNRTLIHQIADIISTQARAFSNSGRYGLDVYAPNVNGFRSPLWGRGQETPGEDAFFLSSAYTYEYITGIQGGVDPEHLKVAATVKHFAGYDLENWNNQSRLGFDAIITQQDLSEYYTPQFLAAARYAKSRSLMCAYNSVNGVPSCANSFFLQTLLRESWGFPEWGYVSSDCDAVYNVFNPHDYASNQSSAAASSLRAGTDIDCGQTYPWHLNESFVAGEVSRGEIERSVTRLYANLVRLGYFDKKNQYRSLGWKDVVKTDAWNISYEAAVEGIVLLKNDGTLPLSKKVRSIALIGPWANATTQMQGNYYGPAPYLISPLEAAKKAGYHVNFELGTEIAGNSTTGFAKAIAAAKKSDAIIYLGGIDNTIEQEGADRTDIAWPGNQLDLIKQLSEVGKPLVVLQMGGGQVDSSSLKSNKKVNSLVWGGYPGQSGGVALFDILSGKRAPAGRLVTTQYPAEYVHQFPQNDMNLRPDGKSNPGQTYIWYTGKPVYEFGSGLFYTTFKETLASHPKSLKFNTSSILSAPHPGYTYSEQIPVFTFEANIKNSGKTESPYTAMLFVRTSNAGPAPYPNKWLVGFDRLADIKPGHSSKLSIPIPVSALARVDSHGNRIVYPGKYELALNTDESVKLEFELVGEEVTI

SEQ ID NO: 349 - DNA, 40 bp, Bacillus licheniformis
gagctcaaaagagaggggattgtaacatgtatcgtttgcc

SEQ ID NO: 350 - DNA, 33 bp, Bacillus licheniformis
acgcgttatttgttcactagatcaacatcaatc

1. A method for degrading or converting a cellulosic material, comprising: treating the cellulosic material with an enzyme composition in the presence of a chitin binding protein.

2. The method of claim 1, wherein the chitin binding protein is selected from the group consisting of:
(a) a chitin binding protein having at least 60% sequence identity to the full-length or mature chitin binding protein of SEQ ID NO: 2, SEQ ID NO: 4, SEQ ID NO: 6, SEQ ID NO: 8, SEQ ID NO: 10, SEQ ID NO: 12, SEQ ID NO: 14, SEQ ID NO: 16, SEQ ID NO: 18, SEQ ID NO: 20, SEQ ID NO: 22, SEQ ID NO: 24, SEQ ID NO: 26, SEQ ID NO: 28, SEQ ID NO: 30, SEQ ID NO: 32, SEQ ID NO: 34, SEQ ID NO: 36, SEQ ID NO: 38, SEQ ID NO: 40, SEQ ID NO: 42, SEQ ID NO: 44, SEQ ID NO: 46, SEQ ID NO: 48, SEQ ID NO: 50, SEQ ID NO: 52, SEQ ID NO: 54, SEQ ID NO: 56, SEQ ID NO: 58, SEQ ID NO: 60, SEQ ID NO: 62, SEQ ID NO: 64, SEQ ID NO: 66, SEQ ID NO: 68, SEQ ID NO: 70, SEQ ID NO: 72, SEQ ID NO: 74, SEQ ID NO: 76, SEQ ID NO: 78, SEQ ID NO: 80, SEQ ID NO: 82, SEQ ID NO: 84, SEQ ID NO: 86, SEQ ID NO: 88, SEQ ID NO: 90, SEQ ID NO: 92, SEQ ID NO: 94, SEQ ID NO: 96, SEQ ID NO: 98, SEQ ID NO: 100, SEQ ID NO: 102, SEQ ID NO: 104, SEQ ID NO: 106, SEQ ID NO: 108, SEQ ID NO: 110, SEQ ID NO: 112, SEQ ID NO: 114, SEQ ID NO: 116, SEQ ID NO: 118, SEQ ID NO: 120, SEQ ID NO: 122, SEQ ID NO: 124, SEQ ID NO: 126, SEQ ID NO: 128, SEQ ID NO: 130, SEQ ID NO: 132, SEQ ID NO: 134, SEQ ID NO: 136, SEQ ID NO: 138, SEQ ID NO: 140, SEQ ID NO: 142, SEQ ID NO: 144, SEQ ID NO: 146, SEQ ID NO: 148, SEQ ID NO: 150, SEQ ID NO: 152, SEQ ID NO: 154, SEQ ID NO: 156, SEQ ID NO: 158, SEQ ID NO: 160, SEQ ID NO: 162, SEQ ID NO: 164, SEQ ID NO: 166, SEQ ID NO: 168, SEQ ID NO: 170, SEQ ID NO: 172, SEQ ID NO: 174, SEQ ID NO: 176, SEQ ID NO: 178, or SEQ ID NO: 180; or the CBM33 thereof;
(b) a chitin binding protein encoded by a polynucleotide that hybridizes under at least medium-high stringency conditions with the full-length or mature chitin binding protein coding sequence of SEQ ID NO: 1, SEQ ID NO: 3, SEQ ID NO: 5, SEQ ID NO: 7, SEQ ID NO: 9, SEQ ID NO: 11, SEQ ID NO: 13, SEQ ID NO: 15, SEQ ID NO: 17, SEQ ID NO: 19, SEQ ID NO: 21, SEQ ID NO: 23, SEQ ID NO: 25, SEQ ID NO: 27, SEQ ID NO: 29, SEQ ID NO: 31, SEQ ID NO: 33, SEQ ID NO: 35, SEQ ID NO: 37, SEQ ID NO: 39, SEQ ID NO: 41, SEQ ID NO: 43, SEQ ID NO: 45, SEQ ID NO: 47, SEQ ID NO: 49, SEQ ID NO: 51, SEQ ID NO: 53, SEQ ID NO: 55, SEQ ID NO: 57, SEQ ID NO: 59, SEQ ID NO: 61, SEQ ID NO: 63, SEQ ID NO: 65, SEQ ID NO: 67, SEQ ID NO: 69, SEQ ID NO: 71, SEQ ID NO: 73, SEQ ID NO: 75, SEQ ID NO: 77, SEQ ID NO: 79, SEQ ID NO: 81, SEQ ID NO: 83, SEQ ID NO: 85, SEQ ID NO: 87, SEQ ID NO: 89, SEQ ID NO: 91, SEQ ID NO: 93, SEQ ID NO: 95, SEQ ID NO: 97, SEQ ID NO: 99, SEQ ID NO: 101, SEQ ID NO: 103, SEQ ID NO: 105, SEQ ID NO: 107, SEQ ID NO: 109, SEQ ID NO: 111, SEQ ID NO: 113, SEQ ID NO: 115, SEQ ID NO: 117, SEQ ID NO: 119, SEQ ID NO: 121, SEQ ID NO: 123, SEQ ID NO: 125, SEQ ID NO: 127, SEQ ID NO: 129, SEQ ID NO: 131, SEQ ID NO: 133, SEQ ID NO: 135, SEQ ID NO: 137, SEQ ID NO: 139, SEQ ID NO: 141, SEQ ID NO: 143, SEQ ID NO: 145, SEQ ID NO: 147, SEQ ID NO: 149, SEQ ID NO: 151, SEQ ID NO: 153, SEQ ID NO: 155, SEQ ID NO: 157, SEQ ID NO: 159, SEQ ID NO: 161, SEQ ID NO: 163, SEQ ID NO: 165, SEQ ID NO: 167, SEQ ID NO: 169, SEQ ID NO: 171, SEQ ID NO: 173, SEQ ID NO: 175, SEQ ID NO: 177, or SEQ ID NO: 179; the CBM33 coding sequence thereof; or the full-length complement thereof;
(c) a chitin binding protein encoded by a polynucleotide having at least 60% sequence identity to the full-length or mature chitin binding protein coding sequence of SEQ ID NO: 1, SEQ ID NO: 3, SEQ ID NO: 5, SEQ ID NO: 7, SEQ ID NO: 9, SEQ ID NO: 11, SEQ ID NO: 13, SEQ ID NO: 15, SEQ ID NO: 17, SEQ ID NO: 19, SEQ ID NO: 21, SEQ ID NO: 23, SEQ ID NO: 25, SEQ ID NO: 27, SEQ ID NO: 29, SEQ ID NO: 31, SEQ ID NO: 33, SEQ ID NO: 35, SEQ ID NO: 37, SEQ ID NO: 39, SEQ ID NO: 41, SEQ ID NO: 43, SEQ ID NO: 45, SEQ ID NO: 47, SEQ ID NO: 49, SEQ ID NO: 51, SEQ ID NO: 53, SEQ ID NO: 55, SEQ ID NO: 57, SEQ ID NO: 59, SEQ ID NO: 61, SEQ ID NO: 63, SEQ ID NO: 65, SEQ ID NO: 67, SEQ ID NO: 69, SEQ ID NO: 71, SEQ ID NO: 73, SEQ ID NO: 75, SEQ ID NO: 77, SEQ ID NO: 79, SEQ ID NO: 81, SEQ ID NO: 83, SEQ ID NO: 85, SEQ ID NO: 87, SEQ ID NO: 89, SEQ ID NO: 91, SEQ ID NO: 93, SEQ ID NO: 95, SEQ ID NO: 97, SEQ ID NO: 99, SEQ ID NO: 101, SEQ ID NO: 103, SEQ ID NO: 105, SEQ ID NO: 107, SEQ ID NO: 109, SEQ ID NO: 111, SEQ ID NO: 113, SEQ ID NO: 115, SEQ ID NO: 117, SEQ ID NO: 119, SEQ ID NO: 121, SEQ ID NO: 123, SEQ ID NO: 125, SEQ ID NO: 127, SEQ ID NO: 129, SEQ ID NO: 131, SEQ ID NO: 133, SEQ ID NO: 135, SEQ ID NO: 137, SEQ ID NO: 139, SEQ ID NO: 141, SEQ ID NO: 143, SEQ ID NO: 145, SEQ ID NO: 147, SEQ ID NO: 149, SEQ ID NO: 151, SEQ ID NO: 153, SEQ ID NO: 155, SEQ ID NO: 157, SEQ ID NO: 159, SEQ ID NO: 161, SEQ ID NO: 163, SEQ ID NO: 165, SEQ ID NO: 167, SEQ ID NO: 169, SEQ ID NO: 171, SEQ ID NO: 173, SEQ ID NO: 175, SEQ ID NO: 177, or SEQ ID NO: 179; or the CBM33 coding sequence thereof;
(d) a variant of the mature chitin binding protein of SEQ ID NO: 2, SEQ ID NO: 4, SEQ ID NO: 6, SEQ ID NO: 8, SEQ ID NO: 10, SEQ ID NO: 12, SEQ ID NO: 14, SEQ ID NO: 16, SEQ ID NO: 18, SEQ ID NO: 20, SEQ ID NO: 22, SEQ ID NO: 24, SEQ ID NO: 26, SEQ ID NO: 28, SEQ ID NO: 30, SEQ ID NO: 32, SEQ ID NO: 34, SEQ ID NO: 36, SEQ ID NO: 38, SEQ ID NO: 40, SEQ ID NO: 42, SEQ ID NO: 44, SEQ ID NO: 46, SEQ ID NO: 48, SEQ ID NO: 50, SEQ ID NO: 52, SEQ ID NO: 54, SEQ ID NO: 56, SEQ ID NO: 58, SEQ ID NO: 60, SEQ ID NO: 62, SEQ ID NO: 64, SEQ ID NO: 66, SEQ ID NO: 68, SEQ ID NO: 70, SEQ ID NO: 72, SEQ ID NO: 74, SEQ ID NO: 76, SEQ ID NO: 78, SEQ ID NO: 80, SEQ ID NO: 82, SEQ ID NO: 84, SEQ ID NO: 86, SEQ ID NO: 88, SEQ ID NO: 90, SEQ ID NO: 92, SEQ ID NO: 94, SEQ ID NO: 96, SEQ ID NO: 98, SEQ ID NO: 100, SEQ ID NO: 102, SEQ ID NO: 104, SEQ ID NO: 106, SEQ ID NO: 108, SEQ ID NO: 110, SEQ ID NO: 112, SEQ ID NO: 114, SEQ ID NO: 116, SEQ ID NO: 118, SEQ ID NO: 120, SEQ ID NO: 122, SEQ ID NO: 124, SEQ ID NO: 126, SEQ ID NO: 128, SEQ ID NO: 130, SEQ ID NO: 132, SEQ ID NO: 134, SEQ ID NO: 136, SEQ ID NO: 138, SEQ ID NO: 140, SEQ ID NO: 142, SEQ ID NO: 144, SEQ ID NO: 146, SEQ ID NO: 148, SEQ ID NO: 150, SEQ ID NO: 152, SEQ ID NO: 154, SEQ ID NO: 156, SEQ ID NO: 158, SEQ ID NO: 160, SEQ ID NO: 162, SEQ ID NO: 164, SEQ ID NO: 166, SEQ ID NO: 168, SEQ ID NO: 170, SEQ ID NO: 172, SEQ ID NO: 174, SEQ ID NO: 176, SEQ ID NO: 178, or SEQ ID NO: 180, or the CBM33 coding sequence thereof, comprising a substitution, deletion, and/or insertion at one or more positions; and
(e) a fragment of the chitin binding protein of (a), (b), (c), or (d) that has chitin binding activity.

3. The method of claim 2, wherein the chitin binding protein comprises or consists of SEQ ID NO: 2, SEQ ID NO: 4, SEQ ID NO: 6, SEQ ID NO: 8, SEQ ID NO: 10, SEQ ID NO: 12, SEQ ID NO: 14, SEQ ID NO: 16, SEQ ID NO: 18, SEQ ID NO: 20, SEQ ID NO: 22, SEQ ID NO: 24, SEQ ID NO: 26, SEQ ID NO: 28, SEQ ID NO: 30, SEQ ID NO: 32, SEQ ID NO: 34, SEQ ID NO: 36, SEQ ID NO: 38, SEQ ID NO: 40, SEQ ID NO: 42, SEQ ID NO: 44, SEQ ID NO: 46, SEQ ID NO: 48, SEQ ID NO: 50, SEQ ID NO: 52, SEQ ID NO: 54, SEQ ID NO: 56, SEQ ID NO: 58, SEQ ID NO: 60, SEQ ID NO: 62, SEQ ID NO: 64, SEQ ID NO: 66, SEQ ID NO: 68, SEQ ID NO: 70, SEQ ID NO: 72, SEQ ID NO: 74, SEQ ID NO: 76, SEQ ID NO: 78, SEQ ID NO: 80, SEQ ID NO: 82, SEQ ID NO: 84, SEQ ID NO: 86, SEQ ID NO: 88, SEQ ID NO: 90, SEQ ID NO: 92, SEQ ID NO: 94, SEQ ID NO: 96, SEQ ID NO: 98, SEQ ID NO: 100, SEQ ID NO: 102, SEQ ID NO: 104, SEQ ID NO: 106, SEQ ID NO: 108, SEQ ID NO: 110, SEQ ID NO: 112, SEQ ID NO: 114, SEQ ID NO: 116, SEQ ID NO: 118, SEQ ID NO: 120, SEQ ID NO: 122, SEQ ID NO: 124, SEQ ID NO: 126, SEQ ID NO: 128, SEQ ID NO: 130, SEQ ID NO: 132, SEQ ID NO: 134, SEQ ID NO: 136, SEQ ID NO: 138, SEQ ID NO: 140, SEQ ID NO: 142, SEQ ID NO: 144, SEQ ID NO: 146, SEQ ID NO: 148, SEQ ID NO: 150, SEQ ID NO: 152, SEQ ID NO: 154, SEQ ID NO: 156, SEQ ID NO: 158, SEQ ID NO: 160, SEQ ID NO: 162, SEQ ID NO: 164, SEQ ID NO: 166, SEQ ID NO: 168, SEQ ID NO: 170, SEQ ID NO: 172, SEQ ID NO: 174, SEQ ID NO: 176, SEQ ID NO: 178, or SEQ ID NO: 180; the mature chitin binding protein thereof; or the CBM33 thereof.

4. The method of claim 1, wherein the cellulosic material is treated with the enzyme composition in the presence of the chitin binding protein and a GH61 polypeptide having cellulolytic enhancing activity.

5. The method of claim 1, wherein the enzyme composition comprises one or more enzymes selected from the group consisting of a cellulase, a GH61 polypeptide, a hemicellulase, an esterase, an expansin, a laccase, a ligninolytic enzyme, a pectinase, a peroxidase, a protease, and a swollenin.

6. The method of claim 1, further comprising recovering the degraded cellulosic material.

7. The method of claim 6, wherein the degraded cellulosic material is a sugar.

8. A method for producing a fermentation product, comprising: (a) saccharifying a cellulosic material with an enzyme composition in the presence of a chitin binding protein; (b) fermenting the saccharified cellulosic material with one or more fermenting microorganisms to produce the fermentation product; and (c) recovering the fermentation product from the fermentation.

9. The method of claim 8, wherein the chitin binding protein is selected from the group consisting of:
(a) a chitin binding protein having at least 60% sequence identity to the full-length or mature chitin binding protein of SEQ ID NO: 2, SEQ ID NO: 4, SEQ ID NO: 6, SEQ ID NO: 8, SEQ ID NO: 10, SEQ ID NO: 12, SEQ ID NO: 14, SEQ ID NO: 16, SEQ ID NO: 18, SEQ ID NO: 20, SEQ ID NO: 22, SEQ ID NO: 24, SEQ ID NO: 26, SEQ ID NO: 28, SEQ ID NO: 30, SEQ ID NO: 32, SEQ ID NO: 34, SEQ ID NO: 36, SEQ ID NO: 38, SEQ ID NO: 40, SEQ ID NO: 42, SEQ ID NO: 44, SEQ ID NO: 46, SEQ ID NO: 48, SEQ ID NO: 50, SEQ ID NO: 52, SEQ ID NO: 54, SEQ ID NO: 56, SEQ ID NO: 58, SEQ ID NO: 60, SEQ ID NO: 62, SEQ ID NO: 64, SEQ ID NO: 66, SEQ ID NO: 68, SEQ ID NO: 70, SEQ ID NO: 72, SEQ ID NO: 74, SEQ ID NO: 76, SEQ ID NO: 78, SEQ ID NO: 80, SEQ ID NO: 82, SEQ ID NO: 84, SEQ ID NO: 86, SEQ ID NO: 88, SEQ ID NO: 90, SEQ ID NO: 92, SEQ ID NO: 94, SEQ ID NO: 96, SEQ ID NO: 98, SEQ ID NO: 100, SEQ ID NO: 102, SEQ ID NO: 104, SEQ ID NO: 106, SEQ ID NO: 108, SEQ ID NO: 110, SEQ ID NO: 112, SEQ ID NO: 114, SEQ ID NO: 116, SEQ ID NO: 118, SEQ ID NO: 120, SEQ ID NO: 122, SEQ ID NO: 124, SEQ ID NO: 126, SEQ ID NO: 128, SEQ ID NO: 130, SEQ ID NO: 132, SEQ ID NO: 134, SEQ ID NO: 136, SEQ ID NO: 138, SEQ ID NO: 140, SEQ ID NO: 142, SEQ ID NO: 144, SEQ ID NO: 146, SEQ ID NO: 148, SEQ ID NO: 150, SEQ ID NO: 152, SEQ ID NO: 154, SEQ ID NO: 156, SEQ ID NO: 158, SEQ ID NO: 160, SEQ ID NO: 162, SEQ ID NO: 164, SEQ ID NO: 166, SEQ ID NO: 168, SEQ ID NO: 170, SEQ ID NO: 172, SEQ ID NO: 174, SEQ ID NO: 176, SEQ ID NO: 178, or SEQ ID NO: 180; or the CBM33 thereof;
(b) a chitin binding protein encoded by a polynucleotide that hybridizes under at least medium-high stringency conditions with the full-length or mature chitin binding protein coding sequence of SEQ ID NO: 1, SEQ ID NO: 3, SEQ ID NO: 5, SEQ ID NO: 7, SEQ ID NO: 9, SEQ ID NO: 11, SEQ ID NO: 13, SEQ ID NO: 15, SEQ ID NO: 17, SEQ ID NO: 19, SEQ ID NO: 21, SEQ ID NO: 23, SEQ ID NO: 25, SEQ ID NO: 27, SEQ ID NO: 29, SEQ ID NO: 31, SEQ ID NO: 33, SEQ ID NO: 35, SEQ ID NO: 37, SEQ ID NO: 39, SEQ ID NO: 41, SEQ ID NO: 43, SEQ ID NO: 45, SEQ ID NO: 47, SEQ ID NO: 49, SEQ ID NO: 51, SEQ ID NO: 53, SEQ ID NO: 55, SEQ ID NO: 57, SEQ ID NO: 59, SEQ ID NO: 61, SEQ ID NO: 63, SEQ ID NO: 65, SEQ ID NO: 67, SEQ ID NO: 69, SEQ ID NO: 71, SEQ ID NO: 73, SEQ ID NO: 75, SEQ ID NO: 77, SEQ ID NO: 79, SEQ ID NO: 81, SEQ ID NO: 83, SEQ ID NO: 85, SEQ ID NO: 87, SEQ ID NO: 89, SEQ ID NO: 91, SEQ ID NO: 93, SEQ ID NO: 95, SEQ ID NO: 97, SEQ ID NO: 99, SEQ ID NO: 101, SEQ ID NO: 103, SEQ ID NO: 105, SEQ ID NO: 107, SEQ ID NO: 109, SEQ ID NO: 111, SEQ ID NO: 113, SEQ ID NO: 115, SEQ ID NO: 117, SEQ ID NO: 119, SEQ ID NO: 121, SEQ ID NO: 123, SEQ ID NO: 125, SEQ ID NO: 127, SEQ ID NO: 129, SEQ ID NO: 131, SEQ ID NO: 133, SEQ ID NO: 135, SEQ ID NO: 137, SEQ ID NO: 139, SEQ ID NO: 141, SEQ ID NO: 143, SEQ ID NO: 145, SEQ ID NO: 147, SEQ ID NO: 149, SEQ ID NO: 151, SEQ ID NO: 153, SEQ ID NO: 155, SEQ ID NO: 157, SEQ ID NO: 159, SEQ ID NO: 161, SEQ ID NO: 163, SEQ ID NO: 165, SEQ ID NO: 167, SEQ ID NO: 169, SEQ ID NO: 171, SEQ ID NO: 173, SEQ ID NO: 175, SEQ ID NO: 177, or SEQ ID NO: 179; the CBM33 coding sequence thereof; or the full-length complement thereof;
(c) a chitin binding protein encoded by a polynucleotide having at least 60% sequence identity to the full-length or mature chitin binding protein coding sequence of SEQ ID NO: 1, SEQ ID NO: 3, SEQ ID NO: 5, SEQ ID NO: 7, SEQ ID NO: 9, SEQ ID NO: 11, SEQ ID NO: 13, SEQ ID NO: 15, SEQ ID NO: 17, SEQ ID NO: 19, SEQ ID NO: 21, SEQ ID NO: 23, SEQ ID NO: 25, SEQ ID NO: 27, SEQ ID NO: 29, SEQ ID NO: 31, SEQ ID NO: 33, SEQ ID NO: 35, SEQ ID NO: 37, SEQ ID NO: 39, SEQ ID NO: 41, SEQ ID NO: 43, SEQ ID NO: 45, SEQ ID NO: 47, SEQ ID NO: 49, SEQ ID NO: 51, SEQ ID NO: 53, SEQ ID NO: 55, SEQ ID NO: 57, SEQ ID NO: 59, SEQ ID NO: 61, SEQ ID NO: 63, SEQ ID NO: 65, SEQ ID NO: 67, SEQ ID NO: 69, SEQ ID NO: 71, SEQ ID NO: 73, SEQ ID NO: 75, SEQ ID NO: 77, SEQ ID NO: 79, SEQ ID NO: 81, SEQ ID NO: 83, SEQ ID NO: 85, SEQ ID NO: 87, SEQ ID NO: 89, SEQ ID NO: 91, SEQ ID NO: 93, SEQ ID NO: 95, SEQ ID NO: 97, SEQ ID NO: 99, SEQ ID NO: 101, SEQ ID NO: 103, SEQ ID NO: 105, SEQ ID NO: 107, SEQ ID NO: 109, SEQ ID NO: 111, SEQ ID NO: 113, SEQ ID NO: 115, SEQ ID NO: 117, SEQ ID NO: 119, SEQ ID NO: 121, SEQ ID NO: 123, SEQ ID NO: 125, SEQ ID NO: 127, SEQ ID NO: 129, SEQ ID NO: 131, SEQ ID NO: 133, SEQ ID NO: 135, SEQ ID NO: 137, SEQ ID NO: 139, SEQ ID NO: 141, SEQ ID NO: 143, SEQ ID NO: 145, SEQ ID NO: 147, SEQ ID NO: 149, SEQ ID NO: 151, SEQ ID NO: 153, SEQ ID NO: 155, SEQ ID NO: 157, SEQ ID NO: 159, SEQ ID NO: 161, SEQ ID NO: 163, SEQ ID NO: 165, SEQ ID NO: 167, SEQ ID NO: 169, SEQ ID NO: 171, SEQ ID NO: 173, SEQ ID NO: 175, SEQ ID NO: 177, or SEQ ID NO: 179; or the CBM33 coding sequence thereof;
(d) a variant of the mature chitin binding protein of SEQ ID NO: 2, SEQ ID NO: 4, SEQ ID NO: 6, SEQ ID NO: 8, SEQ ID NO: 10, SEQ ID NO: 12, SEQ ID NO: 14, SEQ ID NO: 16, SEQ ID NO: 18, SEQ ID NO: 20, SEQ ID NO: 22, SEQ ID NO: 24, SEQ ID NO: 26, SEQ ID NO: 28, SEQ ID NO: 30, SEQ ID NO: 32, SEQ ID NO: 34, SEQ ID NO: 36, SEQ ID NO: 38, SEQ ID NO: 40, SEQ ID NO: 42, SEQ ID NO: 44, SEQ ID NO: 46, SEQ ID NO: 48, SEQ ID NO: 50, SEQ ID NO: 52, SEQ ID NO: 54, SEQ ID NO: 56, SEQ ID NO: 58, SEQ ID NO: 60, SEQ ID NO: 62, SEQ ID NO: 64, SEQ ID NO: 66, SEQ ID NO: 68, SEQ ID NO: 70, SEQ ID NO: 72, SEQ ID NO: 74, SEQ ID NO: 76, SEQ ID NO: 78, SEQ ID NO: 80, SEQ ID NO: 82, SEQ ID NO: 84, SEQ ID NO: 86, SEQ ID NO: 88, SEQ ID NO: 90, SEQ ID NO: 92, SEQ ID NO: 94, SEQ ID NO: 96, SEQ ID NO: 98, SEQ ID NO: 100, SEQ ID NO: 102, SEQ ID NO: 104, SEQ ID NO: 106, SEQ ID NO: 108, SEQ ID NO: 110, SEQ ID NO: 112, SEQ ID NO: 114, SEQ ID NO: 116, SEQ ID NO: 118, SEQ ID NO: 120, SEQ ID NO: 122, SEQ ID NO: 124, SEQ ID NO: 126, SEQ ID NO: 128, SEQ ID NO: 130, SEQ ID NO: 132, SEQ ID NO: 134, SEQ ID NO: 136, SEQ ID NO: 138, SEQ ID NO: 140, SEQ ID NO: 142, SEQ ID NO: 144, SEQ ID NO: 146, SEQ ID NO: 148, SEQ ID NO: 150, SEQ ID NO: 152, SEQ ID NO: 154, SEQ ID NO: 156, SEQ ID NO: 158, SEQ ID NO: 160, SEQ ID NO: 162, SEQ ID NO: 164, SEQ ID NO: 166, SEQ ID NO: 168, SEQ ID NO: 170, SEQ ID NO: 172, SEQ ID NO: 174, SEQ ID NO: 176, SEQ ID NO: 178, or SEQ ID NO: 180, or the CBM33 thereof, comprising a substitution, deletion, and/or insertion at one or more positions; and
(e) a fragment of the chitin binding protein of (a), (b), (c), or (d) that has chitin binding activity.

10. The method of claim 9, wherein the chitin binding protein comprises or consists of SEQ ID NO: 2, SEQ ID NO: 4, SEQ ID NO: 6, SEQ ID NO: 8, SEQ ID NO: 10, SEQ ID NO: 12, SEQ ID NO: 14, SEQ ID NO: 16, SEQ ID NO: 18, SEQ ID NO: 20, SEQ ID NO: 22, SEQ ID NO: 24, SEQ ID NO: 26, SEQ ID NO: 28, SEQ ID NO: 30, SEQ ID NO: 32, SEQ ID NO: 34, SEQ ID NO: 36, SEQ ID NO: 38, SEQ ID NO: 40, SEQ ID NO: 42, SEQ ID NO: 44, SEQ ID NO: 46, SEQ ID NO: 48, SEQ ID NO: 50, SEQ ID NO: 52, SEQ ID NO: 54, SEQ ID NO: 56, SEQ ID NO: 58, SEQ ID NO: 60, SEQ ID NO: 62, SEQ ID NO: 64, SEQ ID NO: 66, SEQ ID NO: 68, SEQ ID NO: 70, SEQ ID NO: 72, SEQ ID NO: 74, SEQ ID NO: 76, SEQ ID NO: 78, SEQ ID NO: 80, SEQ ID NO: 82, SEQ ID NO: 84, SEQ ID NO: 86, SEQ ID NO: 88, SEQ ID NO: 90, SEQ ID NO: 92, SEQ ID NO: 94, SEQ ID NO: 96, SEQ ID NO: 98, SEQ ID NO: 100, SEQ ID NO: 102, SEQ ID NO: 104, SEQ ID NO: 106, SEQ ID NO: 108, SEQ ID NO: 110, SEQ ID NO: 112, SEQ ID NO: 114, SEQ ID NO: 116, SEQ ID NO: 118, SEQ ID NO: 120, SEQ ID NO: 122, SEQ ID NO: 124, SEQ ID NO: 126, SEQ ID NO: 128, SEQ ID NO: 130, SEQ ID NO: 132, SEQ ID NO: 134, SEQ ID NO: 136, SEQ ID NO: 138, SEQ ID NO: 140, SEQ ID NO: 142, SEQ ID NO: 144, SEQ ID NO: 146, SEQ ID NO: 148, SEQ ID NO: 150, SEQ ID NO: 152, SEQ ID NO: 154, SEQ ID NO: 156, SEQ ID NO: 158, SEQ ID NO: 160, SEQ ID NO: 162, SEQ ID NO: 164, SEQ ID NO: 166, SEQ ID NO: 168, SEQ ID NO: 170, SEQ ID NO: 172, SEQ ID NO: 174, SEQ ID NO: 176, SEQ ID NO: 178, or SEQ ID NO: 180; the mature chitin binding protein thereof; or the CBM33 thereof.

11. The method of claim 8, wherein the cellulosic material is treated with the enzyme composition in the presence of the chitin binding protein and a GH61 polypeptide having cellulolytic enhancing activity.

12. The method of claim 8, wherein the enzyme composition comprises one or more enzymes selected from the group consisting of a cellulase, a GH61 polypeptide, a hemicellulase, an esterase, an expansin, a laccase, a ligninolytic enzyme, a pectinase, a peroxidase, a protease, and a swollenin.

13. A method of fermenting a cellulosic material, comprising: fermenting the cellulosic material with one or more fermenting microorganisms, wherein the cellulosic material is saccharified with an enzyme composition in the presence of a chitin binding protein.

14. The method of claim 13, wherein the chitin binding protein is selected from the group consisting of:
(a) a chitin binding protein having at least 60% sequence identity to the full-length or mature chitin binding protein of SEQ ID NO: 2, SEQ ID NO: 4, SEQ ID NO: 6, SEQ ID NO: 8, SEQ ID NO: 10, SEQ ID NO: 12, SEQ ID NO: 14, SEQ ID NO: 16, SEQ ID NO: 18, SEQ ID NO: 20, SEQ ID NO: 22, SEQ ID NO: 24, SEQ ID NO: 26, SEQ ID NO: 28, SEQ ID NO: 30, SEQ ID NO: 32, SEQ ID NO: 34, SEQ ID NO: 36, SEQ ID NO: 38, SEQ ID NO: 40, SEQ ID NO: 42, SEQ ID NO: 44, SEQ ID NO: 46, SEQ ID NO: 48, SEQ ID NO: 50, SEQ ID NO: 52, SEQ ID NO: 54, SEQ ID NO: 56, SEQ ID NO: 58, SEQ ID NO: 60, SEQ ID NO: 62, SEQ ID NO: 64, SEQ ID NO: 66, SEQ ID NO: 68, SEQ ID NO: 70, SEQ ID NO: 72, SEQ ID NO: 74, SEQ ID NO: 76, SEQ ID NO: 78, SEQ ID NO: 80, SEQ ID NO: 82, SEQ ID NO: 84, SEQ ID NO: 86, SEQ ID NO: 88, SEQ ID NO: 90, SEQ ID NO: 92, SEQ ID NO: 94, SEQ ID NO: 96, SEQ ID NO: 98, SEQ ID NO: 100, SEQ ID NO: 102, SEQ ID NO: 104, SEQ ID NO: 106, SEQ ID NO: 108, SEQ ID NO: 110, SEQ ID NO: 112, SEQ ID NO: 114, SEQ ID NO: 116, SEQ ID NO: 118, SEQ ID NO: 120, SEQ ID NO: 122, SEQ ID NO: 124, SEQ ID NO: 126, SEQ ID NO: 128, SEQ ID NO: 130, SEQ ID NO: 132, SEQ ID NO: 134, SEQ ID NO: 136, SEQ ID NO: 138, SEQ ID NO: 140, SEQ ID NO: 142, SEQ ID NO: 144, SEQ ID NO: 146, SEQ ID NO: 148, SEQ ID NO: 150, SEQ ID NO: 152, SEQ ID NO: 154, SEQ ID NO: 156, SEQ ID NO: 158, SEQ ID NO: 160, SEQ ID NO: 162, SEQ ID NO: 164, SEQ ID NO: 166, SEQ ID NO: 168, SEQ ID NO: 170, SEQ ID NO: 172, SEQ ID NO: 174, SEQ ID NO: 176, SEQ ID NO: 178, or SEQ ID NO: 180; or the CBM33 thereof;
(b) a chitin binding protein encoded by a polynucleotide that hybridizes under at least medium-high stringency conditions with the full-length or mature chitin binding protein coding sequence of SEQ ID NO: 1, SEQ ID NO: 3, SEQ ID NO: 5, SEQ ID NO: 7, SEQ ID NO: 9, SEQ ID NO: 11, SEQ ID NO: 13, SEQ ID NO: 15, SEQ ID NO: 17, SEQ ID NO: 19, SEQ ID NO: 21, SEQ ID NO: 23, SEQ ID NO: 25, SEQ ID NO: 27, SEQ ID NO: 29, SEQ ID NO: 31, SEQ ID NO: 33, SEQ ID NO: 35, SEQ ID NO: 37, SEQ ID NO: 39, SEQ ID NO: 41, SEQ ID NO: 43, SEQ ID NO: 45, SEQ ID NO: 47, SEQ ID NO: 49, SEQ ID NO: 51, SEQ ID NO: 53, SEQ ID NO: 55, SEQ ID NO: 57, SEQ ID NO: 59, SEQ ID NO: 61, SEQ ID NO: 63, SEQ ID NO: 65, SEQ ID NO: 67, SEQ ID NO: 69, SEQ ID NO: 71, SEQ ID NO: 73, SEQ ID NO: 75, SEQ ID NO: 77, SEQ ID NO: 79, SEQ ID NO: 81, SEQ ID NO: 83, SEQ ID NO: 85, SEQ ID NO: 87, SEQ ID NO: 89, SEQ ID NO: 91, SEQ ID NO: 93, SEQ ID NO: 95, SEQ ID NO: 97, SEQ ID NO: 99, SEQ ID NO: 101, SEQ ID NO: 103, SEQ ID NO: 105, SEQ ID NO: 107, SEQ ID NO: 109, SEQ ID NO: 111, SEQ ID NO: 113, SEQ ID NO: 115, SEQ ID NO: 117, SEQ ID NO: 119, SEQ ID NO: 121, SEQ ID NO: 123, SEQ ID NO: 125, SEQ ID NO: 127, SEQ ID NO: 129, SEQ ID NO: 131, SEQ ID NO: 133, SEQ ID NO: 135, SEQ ID NO: 137, SEQ ID NO: 139, SEQ ID NO: 141, SEQ ID NO: 143, SEQ ID NO: 145, SEQ ID NO: 147, SEQ ID NO: 149, SEQ ID NO: 151, SEQ ID NO: 153, SEQ ID NO: 155, SEQ ID NO: 157, SEQ ID NO: 159, SEQ ID NO: 161, SEQ ID NO: 163, SEQ ID NO: 165, SEQ ID NO: 167, SEQ ID NO: 169, SEQ ID NO: 171, SEQ ID NO: 173, SEQ ID NO: 175, SEQ ID NO: 177, or SEQ ID NO: 179; the CBM33 coding sequence thereof; or the full-length complement thereof;
(c) a chitin binding protein encoded by a polynucleotide having at least 60% sequence identity to the full-length or mature chitin binding protein coding sequence of SEQ ID NO: 1, SEQ ID NO: 3, SEQ ID NO: 5, SEQ ID NO: 7, SEQ ID NO: 9, SEQ ID NO: 11, SEQ ID NO: 13, SEQ ID NO: 15, SEQ ID NO: 17, SEQ ID NO: 19, SEQ ID NO: 21, SEQ ID NO: 23, SEQ ID NO: 25, SEQ ID NO: 27, SEQ ID NO: 29, SEQ ID NO: 31, SEQ ID NO: 33, SEQ ID NO: 35, SEQ ID NO: 37, SEQ ID NO: 39, SEQ ID NO: 41, SEQ ID NO: 43, SEQ ID NO: 45, SEQ ID NO: 47, SEQ ID NO: 49, SEQ ID NO: 51, SEQ ID NO: 53, SEQ ID NO: 55, SEQ ID NO: 57, SEQ ID NO: 59, SEQ ID NO: 61, SEQ ID NO: 63, SEQ ID NO: 65, SEQ ID NO: 67, SEQ ID NO: 69, SEQ ID NO: 71, SEQ ID NO: 73, SEQ ID NO: 75, SEQ ID NO: 77, SEQ ID NO: 79, SEQ ID NO: 81, SEQ ID NO: 83, SEQ ID NO: 85, SEQ ID NO: 87, SEQ ID NO: 89, SEQ ID NO: 91, SEQ ID NO: 93, SEQ ID NO: 95, SEQ ID NO: 97, SEQ ID NO: 99, SEQ ID NO: 101, SEQ ID NO: 103, SEQ ID NO: 105, SEQ ID NO: 107, SEQ ID NO: 109, SEQ ID NO: 111, SEQ ID NO: 113, SEQ ID NO: 115, SEQ ID NO: 117, SEQ ID NO: 119, SEQ ID NO: 121, SEQ ID NO: 123, SEQ ID NO: 125, SEQ ID NO: 127, SEQ ID NO: 129, SEQ ID NO: 131, SEQ ID NO: 133, SEQ ID NO: 135, SEQ ID NO: 137, SEQ ID NO: 139, SEQ ID NO: 141, SEQ ID NO: 143, SEQ ID NO: 145, SEQ ID NO: 147, SEQ ID NO: 149, SEQ ID NO: 151, SEQ ID NO: 153, SEQ ID NO: 155, SEQ ID NO: 157, SEQ ID NO: 159, SEQ ID NO: 161, SEQ ID NO: 163, SEQ ID NO: 165, SEQ ID NO: 167, SEQ ID NO: 169, SEQ ID NO: 171, SEQ ID NO: 173, SEQ ID NO: 175, SEQ ID NO: 177, or SEQ ID NO: 179; or the CBM33 coding sequence thereof;
(d) a variant of the mature chitin binding protein of SEQ ID NO: 2, SEQ ID NO: 4, SEQ ID NO: 6, SEQ ID NO: 8, SEQ ID NO: 10, SEQ ID NO: 12, SEQ ID NO: 14, SEQ ID NO: 16, SEQ ID NO: 18, SEQ ID NO: 20, SEQ ID NO: 22, SEQ ID NO: 24, SEQ ID NO: 26, SEQ ID NO: 28, SEQ ID NO: 30, SEQ ID NO: 32, SEQ ID NO: 34, SEQ ID NO: 36, SEQ ID NO: 38, SEQ ID NO: 40, SEQ ID NO: 42, SEQ ID NO: 44, SEQ ID NO: 46, SEQ ID NO: 48, SEQ ID NO: 50, SEQ ID NO: 52, SEQ ID NO: 54, SEQ ID NO: 56, SEQ ID NO: 58, SEQ ID NO: 60, SEQ ID NO: 62, SEQ ID NO: 64, SEQ ID NO: 66, SEQ ID NO: 68, SEQ ID NO: 70, SEQ ID NO: 72, SEQ ID NO: 74, SEQ ID NO: 76, SEQ ID NO: 78, SEQ ID NO: 80, SEQ ID NO: 82, SEQ ID NO: 84, SEQ ID NO: 86, SEQ ID NO: 88, SEQ ID NO: 90, SEQ ID NO: 92, SEQ ID NO: 94, SEQ ID NO: 96, SEQ ID NO: 98, SEQ ID NO: 100, SEQ ID NO: 102, SEQ ID NO: 104, SEQ ID NO: 106, SEQ ID NO: 108, SEQ ID NO: 110, SEQ ID NO: 112, SEQ ID NO: 114, SEQ ID NO: 116, SEQ ID NO: 118, SEQ ID NO: 120, SEQ ID NO: 122, SEQ ID NO: 124, SEQ ID NO: 126, SEQ ID NO: 128, SEQ ID NO: 130, SEQ ID NO: 132, SEQ ID NO: 134, SEQ ID NO: 136, SEQ ID NO: 138, SEQ ID NO: 140, SEQ ID NO: 142, SEQ ID NO: 144, SEQ ID NO: 146, SEQ ID NO: 148, SEQ ID NO: 150, SEQ ID NO: 152, SEQ ID NO: 154, SEQ ID NO: 156, SEQ ID NO: 158, SEQ ID NO: 160, SEQ ID NO: 162, SEQ ID NO: 164, SEQ ID NO: 166, SEQ ID NO: 168, SEQ ID NO: 170, SEQ ID NO: 172, SEQ ID NO: 174, SEQ ID NO: 176, SEQ ID NO: 178, or SEQ ID NO: 180, or the CBM33 coding sequence thereof, comprising a substitution, deletion, and/or insertion at one or more positions; and
(e) a fragment of the chitin binding protein of (a), (b), (c), or (d) that has chitin binding activity.

15. The method of claim 14, wherein the chitin binding protein comprises or consists of SEQ ID NO: 2, SEQ ID NO: 4, SEQ ID NO: 6, SEQ ID NO: 8, SEQ ID NO: 10, SEQ ID NO: 12, SEQ ID NO: 14, SEQ ID NO: 16, SEQ ID NO: 18, SEQ ID NO: 20, SEQ ID NO: 22, SEQ ID NO: 24, SEQ ID NO: 26, SEQ ID NO: 28, SEQ ID NO: 30, SEQ ID NO: 32, SEQ ID NO: 34, SEQ ID NO: 36, SEQ ID NO: 38, SEQ ID NO: 40, SEQ ID NO: 42, SEQ ID NO: 44, SEQ ID NO: 46, SEQ ID NO: 48, SEQ ID NO: 50, SEQ ID NO: 52, SEQ ID NO: 54, SEQ ID NO: 56, SEQ ID NO: 58, SEQ ID NO: 60, SEQ ID NO: 62, SEQ ID NO: 64, SEQ ID NO: 66, SEQ ID NO: 68, SEQ ID NO: 70, SEQ ID NO: 72, SEQ ID NO: 74, SEQ ID NO: 76, SEQ ID NO: 78, SEQ ID NO: 80, SEQ ID NO: 82, SEQ ID NO: 84, SEQ ID NO: 86, SEQ ID NO: 88, SEQ ID NO: 90, SEQ ID NO: 92, SEQ ID NO: 94, SEQ ID NO: 96, SEQ ID NO: 98, SEQ ID NO: 100, SEQ ID NO: 102, SEQ ID NO: 104, SEQ ID NO: 106, SEQ ID NO: 108, SEQ ID NO: 110, SEQ ID NO: 112, SEQ ID NO: 114, SEQ ID NO: 116, SEQ ID NO: 118, SEQ ID NO: 120, SEQ ID NO: 122, SEQ ID NO: 124, SEQ ID NO: 126, SEQ ID NO: 128, SEQ ID NO: 130, SEQ ID NO: 132, SEQ ID NO: 134, SEQ ID NO: 136, SEQ ID NO: 138, SEQ ID NO: 140, SEQ ID NO: 142, SEQ ID NO: 144, SEQ ID NO: 146, SEQ ID NO: 148, SEQ ID NO: 150, SEQ ID NO: 152, SEQ ID NO: 154, SEQ ID NO: 156, SEQ ID NO: 158, SEQ ID NO: 160, SEQ ID NO: 162, SEQ ID NO: 164, SEQ ID NO: 166, SEQ ID NO: 168, SEQ ID NO: 170, SEQ ID NO: 172, SEQ ID NO: 174, SEQ ID NO: 176, SEQ ID NO: 178, or SEQ ID NO: 180; the mature chitin binding protein thereof; or the CBM33 thereof.

16. The method of claim 13, wherein the fermenting of the cellulosic material produces a fermentation product.

17. The method of claim 16, further comprising recovering the fermentation product from the fermentation.

18. The method of claim 13, wherein the cellulosic material is treated with the enzyme composition in the presence of the chitin binding protein and a GH61 polypeptide having cellulolytic enhancing activity.

19. The method of claim 13, wherein the enzyme composition comprises one or more enzymes selected from the group consisting of a cellulase, a GH61 polypeptide, a hemicellulase, an esterase, an expansin, a laccase, a ligninolytic enzyme, a pectinase, a peroxidase, a protease, and a swollenin.

20. A whole broth formulation, cell culture composition, or enzyme composition comprising a chitin binding protein and a GH61 polypeptide having cellulolytic enhancing activity.

21. A whole broth formulation, cell culture composition, or enzyme composition comprising a chitin binding protein and one or more enzymes.
